United States Patent Application Publication US 2022/0102000 A1 - sequence listing, part 22

SEQ ID NO: 4458 - DNA, 32759 bp, Unknown
  16S sequences of unknown bacteria
ggtacggtatttattgccgtacccgccgcgccgcaaatattaccgaataatattttacatactaaaaacgccgccgtcaatagttttttaaaaatttaatttactttttcaatatagccgcttataggctcggtatacatattgtcgtccgttaccggcttatagcgtttgccgtcatacacatcggtaaagccgtttgtcgttttatagacctcgttggtctcggtatcgtaaacgcgctcgtaaccgagtatcgcgtcgctctgcttctggctcataatatcctgacttttgttgcggctctcccatgatgacataaagccgtccatagtctggttaaagttctggcttatctgcttggaaagcgcaaccttttcattgcttgcctgatttgtggcgtttacaaagctttccgaataatcaagcgttttcatacattcggtaagcacgctttcccattctataaaggtgtcctttgcggcggttattgccaccacgttatacgccatataatacccgccgtccgcctgctttagctgatagcccacaaccgttccgtcagatatagtcgagctgccgaaatccactacacttgctgagaacattccctcgccctccttgccgccgtcggtaaaagttgcgcgcaaaatctcctcaccgagcgaataggcttttaaattgctgtttgaagcaaacctatcggtcacggtgaaattgtcgtaacgggggaaggtaaagcccgcgtaggtggaatccattttagaggcgaaatcgccgtaggctgagaaaattttaaagaaattctcggtagaggggttttcaagcacaaccgcgtttgcaaacagtgccaattgcgtatttcccatattataaaggctttggtatgccgctttgcccgcctgcgagtgcaagaggcactccgctttaagcagaatatacataccgttgagcggctcgttcgggtcggttacgcgtatggtgtggtaaatattcgcgccgcccgcagttaccttccaacccttaggtattgtaatgctgaaatcggcggtttcgtatttttcggtctgcaccgcctttgccgcagtttgggtgacctttatgccgcgttcggtttttacggtttttgtgccgtcgctgtttgttacggttttaccgccgcaggcggtaagggaaagcgcgagcagggcgcaaacagcggctggaagtatttttcttttattgaaattcatatgctttactcctttatttatcgcggtaggcgttgtaaaatttgttgcaatcgtatttataatattcagcgtagccttcggtcataatttccgaaatcggtaagagggtgtaatcatcggttattacgtggcttgtgcagatattgcgcacatccttgtaataattggtaagcagggttatttttcttaaagtgaggttgcagttaaggtgcggcgcggcgggataatagggcgaaactgagccgtcgggcgctgtctgtgcgtttttatcattatcatcaagcggctccgacgcatacacaatctcataaaacgcgcagttcgtcataagaatattggtgttgaaaagccttatcggggtctcgtttcctatcgccgttaaatcaatatcgtaggctatgtattcccgccagcccatatctctgtaccagttccacccggcagtgtttttatcaaggtatttagccgtatcaataaggcttacctttttgcctgtaatggctaacatcggtgtgcggtggcggtaaaccttatcggcgtttaaaaattccacggtgcagtcggtgagcgttttgccgtcggatgaatagcggtaaacctttttgaaaagagggtattttcccgtatcgattttttcgggaatataagacataatcggcgattgaccgctgagcttataggcagagccgtccttaaaatagaaattgcacatttcgccgtcgtaggtggcgtcccaataccttacctcggcggttgacggcagcgtgaatgtttccagaatatttttgccattagaaagcggcaaattaaagtttgcacggtaggtcttgccacccgaaactatcatattatcaatggttgtgctgtaggagtgatcgataaagcaatcaaattccgaggttatatcaataatcccctccccgccgataatctttttataatccgattggtcataaggtcggccgcgctcctttaaaagcgcctgttccagcgttacaggctctgcttgcgttgaggcgttaagtgacgtgtccttttcagcggtaggtcttgatgttttcctgcccttatccgcgcacccgcaaagcagagtgaaagcaagcaaaacagcggctaagccccgtatttttaattctgattttatattcattgttctctccttgcaaaacagaatattcccataaatattttagcatatataccatattaacgaaaaaataatttccgttaaggcatttgccaaaacggaaattttatactttatttttttatggtcttgttgtataatgtaaaaaaacactacggacgtgaaaatatgaaattctgcgataagcttaacgaatatatagaaacgcttgaatgtaccgccaaggaattaagcgagctttcgggcatatcggcggcgactgtaagccgctatcgctcgggcgaaaggctgcccgatgccgaaagcgaggctttttcatcacttataaacgcactggcaggcattgccgaaagtaaaaaaattgcccttagtgcggaagaaatacgcgcgcagcttcttgcctgtgacggacttgttttggtcgataaggagcagctgcggcttaatttcaatacgcttatctccgtgtttgatataaatatttcaaagctttgccgcagcacaaattacgacagctcaaccatattccgtttcagagacggctcacgccgccccgccgaccccgagcaatttgccgaggcagtggcttcctttgtggcaagggagataaattcccccgccgaccttgccgttttggcagagcttataggcgaggaaacagacgaccgcgccgcaagatataaaaaaatcaaggaatggctgctttgcggaaaatcgggtgataccgaaagcggcggcatttcgggatttcttgcaaagctggatgaatttgatttaaacgaatacattaaggcaatacattttgacgaaatgaaagtaccctccttaccgtttcagctgcccacctcaaagtattattacggtcttcacgaaatgatggaaagcgagcttgattttttaaaggctaccgtgctttcaaaatcgaatgacgacgttaccctttacagcgatatgcccatgaccgaaatggcaaaggaccccgattttccgaaaaaatggatgtacggaatggcgcttatgctcaaaaaagggttgcaccttaacaatatacataatattgaccgctcgtttgaggaaatgatgcttgggcttgaaagctggatacctatgtatatgacggggcaaatatccccctattacctcaaaaaaacgcagaacggtgcttttaatcattttttgcgggtatcgggcgcggcggcgctctcgggcgaggcgattgcgggctatcacgaccgcggcaggtattatctttcaaaaaccaaggacgatataacgtactataaaaaacgcgccgaggaccttttgaaaaatgcagcatccttaatggaaatttaccgagaggacggcgcgcgcagactgaacgcgtttatgcttgccgacgcggaaaacgcgggcaaacgccgcaatattctcaccgtgccgccgctttataccgcgggagcggatttccttgaagggctgcttgaaaaccgtaaaatacaggcggaggataaaaataaaattcttgaatttgcgcgttcgcagcgcgaaattgcggaaaaaattcttgaaaatggcagcataaccgacgaaatgccgattataagccgtgaggaatttgaacagcacccggcggtcttgcccctttcgggaatgttctacggtaaagacatatgccttgcctatgatgaatactcagagcatataaagcaaaccgagcagtttcaaaaagcacacgaaaattataccgcggaatttacaaggacaaacgcgttcaggaatttgcagattttaattcacgaggggcagtgggctatgatttcaaagggcaacgcccccgcaattcattttgttatacaccacccgaagctgcgcagcgcaatagaaaattttattccgccggtaattgaaaataaagaaataatgtgataaaatttaatgtgaaaaatcaaagggaagtgtttttatgtatcctttattgcttgagcctccggttaaggattacctgtggggcggaacaaggcttaaaaccgattatcattttaaaaccgataaggaaaaagcagctgaggcttgggtgctttcctgccataaggatggcgccgatacggttacaaacggagagctggcgggcaagaccctgcctgaggctattgaactttggggcgataaggctcttggtaaaaatgcggcggcttttccgttttttccgctgcttataaagcttattgacgctaaggacagactttccgttcaggttcaccccgatgatgattatgctctgaaaaacgagggtgagttcggcaaaaccgaaatgtggtatgttgtagactgcgatgatggcgctgagctgatttacgggtttaacagggaagtctcgcgtgaggagcttgagcgcagaattaaggataacacactgcctgaaatttgcaattatgtgccggttcataaaggcgacgttttctttattgccgcaggaacattgcatgcaataggggcgggaatacttatagccgaggttcagcaaaactcaaataccacttaccgtgtttccgattacggaaggcttggggctgacggaaagcctcgcccgctgcatatagaaaaggcgcttgatgttacaaagcgcgaaagaccttcactcccgtacggcgcggtgggtgaaaccgaaaagaccgaatacggcagtaaaagaaggcttgcagcctgcaaattcttcaccaccgagcttttaaagctgaacggaaattttgctttaaagcaagaggatagctttgtatcgcttttggtgctagagggagaaatcggcgtatcgtggggcgccggcgagcttatagccgcaaagggcggcagcgtgtttatacctgccgggcttgaggttaaaattacaggtaatgcggaaattcttttaagcagggtataaaaaattcaccctctctctgacgagtgagggtgaattttttgcttgctatttgtcaaagccggggttaaaggcgtagaagtttttgcaatcaagtctgtcggtcgtaaggcgcagcgcctcgccaaaacgctgataatgcacaacctcgcgttcgcgtaaaaacttcagcggatcggttatatcagggtcatctataagccttaaaaggttatcatatgtcacgcgggctttttgctctgctgccaggtcctcgtgcaaatcggttataacatcaccctttgactggtaatatgtcgccgtccaaggcataccgtttgccgccgcctgatatacgccgtttgtatggcttacaaaatacggcgcaaagccgcttgcgtttatttcctcgggcgtaaggtttcttgtcagctggtgtaccatagcgcatatcatttccatgtgcgccagttcttcggttcctatatcggtaagcattcccttaacctcgttatagggctgaccgtaacgctgggtcaaatatctcagcgccgcagaagcttcgccgtccggaccgccgtactgctccattataatttgagcgtatttgggatttgggtttttaatattaaccgggtattgcagttttttctcataactccacataaatttcagccctccgtaaagtcgttatcccacggccatgggccgtctatccatttccagctaccctctgtcggtgcgtcgttcgccgttattataaggtcaccgaatttttcacggtattccgccataacggcgtcgcgcttttcgcggtattcacgcataagctccagcgcccttgcgctttcggggtgtgaatcaagaaacagtacaagctcgtatatggcaaaatccagctcgtagagtttgcgccttaattttgcttgttcggtcatctgcgcgcacctcccaaaaacggtttgtcaagctcggggaacagcgttcctctgcaaaacgccttatcaagcggataaacgccgttgatcggctgcatattgataaaaaccatagtaagcggatctgtgcaatcggtgttcgcggtatcgcagcgaacggttcttcgcggtgcggtcatacagccgcatttttcatagaaatccgcaacattaaatcttgtttccattcctgtttactccttttttaaattgaggattttgtcctataacagtttattgaaaagcctcgtaatttgttacaagacttcatattaagaaaatattaagatattataaataaaattaataaattgataaatttaccttttgcatattgtaatctattgacttattatatataattagtgtaattgggctaaatttgttattttaataacaatcaatttttaaaactattttttacccttgggggaggtgctttattttgtcaaatgttgtagataatctgtacgttgtcggaatgggtctgggcgttgtttttgtgggattgatttccataattattctctgttatattataggtgccatatgtatgtcgtccgataaaaaaacagaaaatgctgctccggctcctgccgctgttcccgcgcccgcaccgatagaaaaccgcggagaaataatcgctgcggtatcggcggctcttgcggaagaaatgggaaccgatatttccgcaatcagaattttgtcatttaaaaaaatttaagaaaaaggtgttagaaaatgaaaaaatacaatgttacggtaaacggtaccgcatatgaagtaactcttgaagctgtagacgcgtccgaagtaaaagcagctcccgctcctgcggcagcccccgcgcccgctgctgctccggctcccgctgctgctccggctcccgctgctgctccggctcccgctgctgcgcccgcagcccctgtttcgggtggtaaggaaaccgtttcaagcccgatgcccggcaatattttagccgtaaacgttacaaacggcgctgcggttaaaaaaggcgacgtgcttatgattcttgaggctatgaaaatggaaaacgaaattatgtccccctgtgacggaaccgttctttcggttaatgttacaaagggcgcatcggtggaaaccggcgctgttctctgcgttataggctaacggttgggagaattgacatatggataaaataattgaatttgccaaaacaacaggcttttatatgctgttcggcaatatgagagaaaactggacgtcgcttgtgatgatccttatttctctgcttcttttgtacctcggcattaaaaagcagtttgagccgctgctgcttgtaggcatagccttcggtatgctgcttacaaaccttaccgcgtttacgggtgccgataacgccatgtaccacaccgagctttgggctgaatttatggcggcgggcgagcaccactacgattacggatatatattaagcaacggcggtttgcttgatttcctgtatatcggcgttaaaacctgcatttacccctgccttatatttataggtataggcgctatgaccgactttgagccgcttattgcaagcccgaaatcattgcttttgggcgctgcggcacaggttggtatatttgtaacctttatcggctgcttggcgctcgctttcccggcggaggctgccgcttctatcggtattatcggcggtgcggacggtcctaccgctatttacaccacctcaaaactttacccgaaccttttaggcccgatagccgttgccgcatattcgtatatggcgctggtgcctgttattcagccgccgattatgaagctgctcaccaccaaaaaagagcgcgcaatagttatgaagccgctgcgcagagtaagcaagacggaaaaaataattttcccgattgcggtaacaatatttgtagctttgctcgttccctcggctactccgcttgtgggctgcttaatgctcggtaacttatggaaagaatcgggcgtttgcgagcgtctttgcaagaccgcacaaaacgagcttatgaacattgtaaccatattcttaggcatttcggtaggtgctaccgccaccgcaaaggcattcttaaattggcagaccataaaaatactctgcatgggaatagtggctttcggcctcggcactgcgggcggcgttttgcttgcaaagcttatgaacctgtttacaaagaagaacaagataaatccgcttatcggctctgccggcgtttccgccgttcctatggcggcgcgcgtttcgcaaatggtgggtcagaaagaaaacccctccaacttcctgcttatgcacgccatgggtccgaatgttgcgggcgttataggctctgctattgcggcaggcgttcttatttcgattttcggttaatcggaggattttaaaatggaagaaaagaaattatatataaccgataccattctccgtgacgcgcaccagtctcaggcggctacgcgtatgcgtattgaggatatgctccccgcgcttgaacagcttgactcggtaggctactggagccttgaatgttggggcggcgctacgtttgacgcgtgtatgcgctttttgaacgaggacccgtgggaaagactgcgcacccttaaaaagcatatgcccaacaccaagctgcaaatgcttctgcgcggtcagaacctgctcggctacaagcattatgccgatgacgtggttgatatgttcgttaaaaagtcgattgaaaacggcattgacgttatccgtatttttgacgcgcttaacgatacgcgcaatatggaacaggctatgaagagctgtaaaaaatacggcggaatatgcgaggcggctataagctacaccgtaagccccgttcataatgaggaatactttgttgaaatggcaaagacccttgaaaaaatgggagcggacgttatctgcattaaggatatggcaaatttgcttttgccctataaggcatattcgcttgttaaaaagcttaaagagaacgttaatgttccgattcacctgcatacccacaacaccaccggcacgggcgatatgacctatcttatggcggcgcaggcgggcgttgatattgttgataccgcgctttctccccttgcaaacggcacttcgcagccctctaccgaggcgcttgtggcgacgcttcagggcaccccgcgcgataccgggcttgaccttatgaagctgagcgaaatagcggcgcatttccgcaaggttgccgataagcttaaagccgagggcatacttgacccgaaggtgcttaatgttgatacaaagacccttatttatcaggttccgggcggaatgctttccaaccttttatctcagcttaaacaggctaacgccgaggataaatactatgacgttttggcagaagtgccgagggtaagagaagatttcggttatccgccgcttgtaacgcccaccagccagattgtaggcacacaggctgtgctcaatgtgctttcgggcgagcgctataagatgatcaccaaggaatcaaagggacttctgcgcggcgaatacggcagattgccgggtaaggtaaacgaagaggttcgcaaaaaggctataggcgacgataaggttataacctgccgccccgcagaccttttaaagccagagcttaccgattacgcaaaggaaatgcgcgataagggcataggcaaatcggaggaggatgtgttaagctacgcactgttcccgcaggttgccgaaaagttctttgcggtaagggataagaagaccccctcaaatattgatgaaaacggggttcgtcagcttgttgttgaggacttgtccgtttgagctttttaaatatgctgtcgctgatatgcgacagcatattttcacatcataataaacagcataagcatttctttgacccgttcgtatattttctcgacgtccgctgcgggcaaaggatttttgccgagccctaattcaattgtgaacccgggtcggcaaaattctgtaatgaaccaatccttaaacccgccgccgtcggcaatgcccgtgggcacgtcaagtgcgtagcccgatgaggtagccattatttccgccatcttttttgagcggggcggcactgtttcgccgtagctccaatatatgacttctccctgtgaatgaagcgccgccgcctggcgtatatttaccgtgcggcaaagctctgtaagcgccagcgtttcaggctcgctttctggtctgtagcccccgaaacgggtagatgcaggacccaatattccggcttttatctccttatttttcagggttttccagtcggcattaaaattgtggttaatatcaaccccgcgcagatttgcgttccaatgctcaaaatcccccaggcacagccgccttacggtgctgccaagctccccgcaggcgtttataccgttaatgcttatttcgcagccgtcgggattaacacagggaacaaatatcacccctctgtctttcaatgcacgcgcggcgtttaagccgcatagataacctccgctttttacggcagccgccagttcttcaataaacataagcaatacaaccgaggttatatgctcgctgccgtgaaatgcggcagcaataaggctgtactccgcagccgagccgattttaagggcataaatatccctgccgccgcagctgcgcccgataacgctccgctttataaattcgtactccgcgcaaaggctgtctataacctttctgcgtgcggaataatcataaaccgcaggctttacaagcttgttcatcataccacactcccataaagtatattaaaagaggttgaatttaatgaatttggaagaaaaacaaatttcaagtgaatatatctatcaaggcaaaattataaaacttcgccgcgatgcggcgcttttaccgaacggcaaaacagccacccgcgaggtaatagagcataacggcggcgtttgcgtggcagcgctgaccgataataacgaggtgctttttgttaaacagttccgttacccgtatatggaggttgtgaccgaaattcccgcaggaaagcgcgacagtgccgatgaagacccacttgcctgcggcaagcgcgagcttaaagaagaaacaggcgccgaggctgaaaaattcatacccttaggcaggctttacccgtcgcccgggtattgcggggagataatttggatgtttgccgcagcagggcttaaatacggcgaacagcaccccgatgacgatgaatttttaagtgtggaaaaaataccgcttgaaaaggcagttgaaatgatactttccggcgagattaccgacgcaaaaacccaagcggcggttttaaagctaaaacttttaaaagataacggtaaaatttaggaaaaacggaaaattaaggaaaaaacttgatttttaaacacacgtagggtagaattgttttaaaatgccgtgagaggacgaaaagtatgccaataatttatgacagtaaaaataaaacctttaagcttgatactgctacttcaagctatattattaagatatatgatgaaaactatatacttaatttatattacggagcaaaaatacccgatacatatgtacccgaccgtgaatgtgtttcgcctaacgcctcattcagcccggctaatcccgtaataggtgaacacggcttttcgcccgacagcgcccctatggagtacggtacaaacggtgcgggggatttcagaatttcggcgcttgccgtcagaaattcaaacggtgacagcgtgaccgatattcgctatatggggcacaaaatatataaaggaaagccggaaatacccggtcagccctcaacctatgcaaacagtgaggacgaggcggaaaccttagagctttacgccgaggacgccgttacaggacttaaaattaccctttattataccgtttttgaaaattacggggttatgacccgccgcgtgcgcgccgaaaacaatggcgatggcatattggagcttgaaagaattttcagtctctgtcttaacctgccctcaatggattatgaccttatcaccctttacggcaggcacgcaaaggagcgcaatattgagcgcaaagcccttgcacacggtgttcagggggttgaaagcaggcgcggtgtatcaagccactgccaaaacccctttgcggctttagcaggcaaaaatgccgatgagaataatggcgaggtttacggctttaaccttgtttattcaggcaatttttctgcactttgcgaatgtgactttaattatacctcccgctttattatgggtattaacccgactgatttcggctggaggctgcaaaagagcgaatgttttgatacacccgaggcggttatggtatacaccgaaaacggcataggcgaaatgagccgcattttccaccgtttttacaataataaccttatacgcggcaaatataaaaccgaaaagcgcccgctgcttataaacagctgggaggcggcgttctttaattttgacgatgaaaagcttgtgaattttgcgaaagaggctaaaaagctcggcattgaaatgctggttatggacgacggttggttcggcaggcgcaacgatgataaatcatccctcggagattggtatgtaaacgaggaaaagcttaaaggcgggctttcttaccttatagagcgtgtaaacgctgaaggcttgaaattcggcatatggtacgagcctgaaatgatttcgcccgattccgacctgttccgcgcccaccccgattggcatgttcatgttgataacagagtaccaatgcttggcaggaatcagtatgtcctggatttttcacgcgaggatgtgcgcgagaatatctggcagcagatgtatgatgtgctttcaaagaataaaattgactatttaaaatgggatttcaaccgtaatatttcggacgcgggttcggcacttttgccgcccgaccgcaaaaaagagtttttccaccgctttattttgggtacatacgaaataatggataggctgaccaaagccttcccgaatattctttttgaaaactgctcgggcggcggcggacgctttgaccccgctatgctttactattcgccgcagatttgggcgagcgataacaccgacccgattgaacggctgtatattcagttcggtacatctatgtgctaccccgcctctaccatgggtgcgcacgtttctgcctgtgacagaacaggctacaagactaaaggtaatgtggcgctttggggcacattcggctatgagcttgacccattaaagcttaccgattccgaccgcgaaataataaaggagcaggtaaagctttaccacaatacctacgatttaataagaaacggcgatttatacaggctggtatctccctttgaaaacccataccgtgcggtttgggagatagtatcgcccgataaatcccgcgctatggtaacggtggttacaatgcgcggagaatgtgctccgcatacaatagttaaattgagggggcttgagccgcaaaggtattaccgaaatgagaaaaccggcgagacctattcgggcgcattgcttatgaacgccgggcttaaccttacctacaccgcaaataatgacggcgacagtgagttgctgatcttcacagcgatttaaagaaaaacagagcaaaaaataatcccccttattcgaggtgggattattttttgctgcaaagtgtatgtatactgtaatattattcagccgacgttataatcaggtcgccgcttaccgtgtctgtttcaaaatcggcggagccgtcgccgcaaacacggcgatttttgctttcggaaacagtgggaagcccgcagcttatatcaccgcttacggtatcggctttaagcgtgaagccgctgtttttgggtattgtaagtcttatattaccgcttgtgctgtcgcaatccagctttttaagcggtgtggcagagcttacggtcacatctcccgaaacgctgtcgctttcaagctctgtaaattctccggcggcttttatactgccgcttaccgtatcaatatcaagcttttctgttttgatatttttcaaatttgcgccgccgcttacggtgtcaatttctattttatcgctcgccgaaatgccggtaatagttacctcagccgataccgaatcggacgtgacggcttttagcccttccgccacgtttgacggaattttaaccgtaagcgtttttttcggagtttgtttcaacccaaatcgcatacctgccgccatttgctgaatttttaaaacaccgtcctccacacgccagcggagtttattctctttttccgcaacctcggtttcgcttataacggtatcctcgccgtcgtatgcttctatgtttatttttccgtttgtccagttcaccttaatgctctgaaattcatcggtcaccgttccgccgcccacattgtaaagggcggaatttttatatgttactccaatagtgccgagcgaccagtctccggaaaaaaacgaggagggggaggagctaataccgactaccagcaaggaagtaagtaaaacagctaccagcgaccatattattattcttgcaattgcgtttcgtttcattatgcgtacctcatctctttaaatcgaaaaccgctcttactatattggagaccgcgccgccgattatgaaaataagccagcttatataccaagccccggttaaaaagcttataacaaaatacgccgttaaggtaagcgcccaaacagcgccgtttacagcccccataagcgagcggtcctcgtttttttcgcggttccattttttgaaatcctcaaccaccgtgtcgtcggtcggcatatattcaagcctcatcccgctgcggtaaataataagcgccgtggcaaccgccgctataacaaacattgaaacaatgccgaaaacctcgtttacgcctatttcatcgcaaattataaccggcacaacgcaaagtatgtaaagcgccacagcaaccgctaaaagcagcgtgcgcttattttgatttttccgtatttcctcgcgtgagtagcccgatgacgctaccggggctataatgctgtcaatcaggtggtcaacatcacctattccggcaatggctatattataagccgcctcgtcactcttgccctccgcctttaaatcgttgtagcggtcaatggtgttttgcagtatttcctcctttatttccaccgcctggcgggtttgcggagcgtttttaaaaagctcctctatgtgttcgcgcagtttttcattcatttttattttcctccgtttcaataagctcgtcaataatctttttcgccgtttcccattccgcaataagtgaacggcatttatctatgccggtgggggttatgtggtagtattttctgcgggcacccgtgccctcggcaccccagtaggagtttatacagccgccgtcttcaaggcgcttaaacgcagtatacagcgtcgcctcgttaagctcgtacctgccgcccgacgccgattttatttttttatttatttcgtagccgtagctgtcgcgcagcagcagcgccgataaaattatcgtgtcggtgtgttcccttataatatcgcttgcgatagacatatcctcatctccttaatgtatataataacttaaaataccttaaaagtcaaggtattttaaaaataaaaaaacaaacgccgccgtttttatggcaagcgtttgtttttttgtttctataaaaggtctttaagctgtggaagcgaggttatctgatattttgcaggatattttgccgtgtggcttgctgggttgtaccagcaggcgtccaaccctgcgtttatcccgcccaaaatgtcagagctttggctgtcgcctataataagaatattttccctgttcttttcgggaattttctcaattatataatcgtaatattccttttcgggcttttggtgccctgtatcctctgaaacgaagatcccgtcgaaatatttatccagccccgagccgcgtatgcgcttgtactgggtcagcgaaataccgtttgtggcggcgtaaagcttatagccccgcgctttcaggtaggtgagaatttcatcggcaccctccaccttaaaatatccctcggataaattaaggcagtaatcctttgatattttcgcggtatcgcccgaaacaccaagtttttcaaaaagggttttaaagcgcccctcaaaaatcgcctcgcgcggaatttcaccgcgctcaaagctttcccagtagctgcggtttatatcggaataaagcgccacggtagcgtcgtcgtgcggcagcccgtgcgatttcagcaccttacgcactgcgtgcgcttctgctgcgttaaaatccagcagggtattgtcaaggtcaagcaaaagggaagtatacatcacagctttgcactcagttcctttaaatattcccttaattgctccttaatttcggggtgagcaagccctacctcaatattcgcctttaaaattccgaatttattgcccatatcatagcgtataccgctgaaatcaacgcctaccataccgtatttaacggcaagcgtgcgcatagcgtcggtcagctgtaattcgccgcccacgccgagcggggttttttcaagtatgctgaaaatttcgttatcaagcacacatctgccgaggatggagtaatttgaaaacttggtttcaaggctcggcttttcaatcatatcggttacggaataaattttatcgtcaagcttttctgcctttaatgagctgtatttaacaataagctcatctgatacttcctttatgccaacaacgctcttgccgtatttctcgtatgcgtcgcacagctcgcctatggcgggcggctcgcctataataacgtcgtcgccgtaaagcacggcaaagggctctgtgcccacaaattccttggcgcgcagcactgcgtcgccgagaccccgcgtttccttttggcggatataatagatatttgcaaggtttgccaccttatcaagcgtttcaagcattgcggtgttgccgcgcctttcaagcattgcttcaagctctaccgagtggtcgaaatggtcctctataacgcccttgccgcggttggtaattataagaatatcggttattcccgctcttaccgcttcctccacaatatactgtattgcgggcttatcaactattgggagcatttcctttggtaacgcctttgacgcaggtaaaacacgagtgccgagccctgccgcggggattattgcctttttgattttcatattttttctcctcttttaaagcattgaaataacagcggtcactgctgatgttagattatttactacaactatgcaaattatgccgactgcaagcataccgcccgagactccgccgacggacgccagccccattgtgtaataacggcggtcacttatgttcatacggaaattgtttattaccttaatgcaatgctctttatacgagtaatatccgaaaagccctgtaagtatgcaggttgcaaggtcagccgcactgcttattacgtctgctataacgtcaagcagggtagatgtgctgccgatagaggaaagcgcgttcagcacgctttgcatatcgcccgataaaaacgagcggtaaagcagggtgtaatcagccgaggtagtattgaaggtaagcgcggctactataatattgataagcgcgcctataaccgcaagcagcgcgcctgttttatacattttgcggtagaagaaccacagcgccgcgcccataggtccgaaaaagaaaccgagaattgccgcgggccagcaccacgaaaccttggaatttgttatttccattttaatgaatttcggcataataacggctgactttttacctataaagagcgctaactcctcctgcggtattccgtccgttattgggctgctgtcaggcgtataccccgcgctgccgtttgccgtgttataaaccggcggagccggctgaaatgaaggctgctcgactttcggctcgggcgcggtttgtgcaataaactcgtgctcaggctccgcttttgcaggcgcgggctctgccggctttgtgggggaggtcagcagtgttccgcagtttttgcagtaaatataatcgctttcgttttctgttccgcactcggagcatatttttttgtccatttttaatcctcctaaataaaaatcgctattaaagcgggcagatactgcaccgccattgtacctataagaaacaggaaaatgtttactccgccttttttgcggtagtcgtagtccatatcctcgctttcggcacgaatggtcttgatagaggatatggcatattgcttataaaggtaatcgccgaaaagcgccgataaaagccttaccgctatattaagtataaaccctacaagcatagccgccagcaccgccgtacccatttcgggcaggtgctcgtagatattctgcataagctgcgcctgcgtttcgttagcggaaaaaccgagattgtttactgcgttcataaacggcaggtaaaaaagggtggaaatagcagttaaaagccctgcaacaattccgtttttatacattttgcgcgagagcatccacccgcaggggaaaagaaaggcaagccagttccacgaaagcttgtttttagcgttaagcaccgcgaatttcggaatataccgcggggtattcgccgctacaaaacgctttgcttcgtccgcggttataccgtcgcctatatcgtaatccgccggtactccgcacaaaaagtcaaagtttacaaagctgccgcccgcctttgctatattcggcgcgccgcatttcgggcaggcgttcagcgcaaaatcatatttttcgtggcacatctggcaggttataagcccctcggcgttttcgcccgtattcggcatttctgcggcgttttgctctgcctcgcgcgccttgaccttatcatactgccggtctgttccgtgaaattcctcaagcgcgcagtgccccagctgattatagcactccctatggtgcggcgcgccgcacacagggcagtaaactatatcatcctcagggaataggtatgcgtggcatcttacgcagcttacaccttctgtattaagactcatacaacggctcctctgtaatcttctattttgccgaaaacgctttcaaaatactctttgccgtaattatgaaaggttccgttttttatcatttctttaagctctttgcccgttatccacttagcctcggcaacctctgtttgctgtaaggtaagcttttctgccggggtgttgctttcggtcagccatacgtcaagcagtgaattgcgccgcttaattcttgtaagcagctgcatattgcttttgtcggcggcaatgctaagctcctcttgcagctcgcgctgtgcggcggcaagcgagtcttcacccgcaacagcggcgccgccggttgccgcccattcgccgggcataagctttttatcgtccgctcggcgctgaattaaaaataaaccgctctttgatactacccatatatgcaccactaagtggtactcgcccggtgctaaaacggagtgcccgcgaagcgcggttttgcctgtgggaacgccgttttcatcaagcacatcccatagctcaacactcataacgcttttttaccgtttccccgctttttttataaatgctgttcggctctataacgccgcgcacagatgagagcggataaatatttgtatttttaccgactatcgttcccgggttcagcaccgtgccgcagcccacctcaacataatcgccgagtattgcgccgaactttttaagccccgtttcaagcctttcttcgccctttttaagcactacaaggcttttatccgacttaacattggaggtaatggagcccgcgcccatatgcgagtgaaagccgagaatggaatcgcccacataattatagtgcggtacctgcaccgtgcctataagcaccacgtttttaagctcggttgaattgcccaccacgcaatcgttgccaacaagcgcgttgccccttataaaggcgcagtggcgcacctcggttctctcgcctataatgcagggacccgtaatacttgcgctcggcgctatttttgccgaccttgcaatccaaatgctttcgccgcgctcctcatatatttccttatcaagcgcaggacctatttcctttatataatcgcctatttttttcagcgcctcaaacggataagtcacgctgcaaagcagcttttccgccaaggtaccctctgccgataaaagctcttttacggttataccggtcataaatttcacacccttttaacctttttacatttattatacacgctaattatatcagctttatgaatttttttcaacattttctatcttaggtattgtaaaaaaataaaatatgtgttaaaatacatagcatagaccttgttcactcgggtgtgcgaacgggcgggtcctgtgcgacggggcgctgcgaaccatgtcaggcggggaaccgagcagcattaagcggtattccccgtgcgccgcagtaaatcggttcgttcgtacacccgggtgagtaaggctttttttgtcaatcaattcggaattcggaattgaaaacagttgatatcattttattaaggaggatgcgtatgtcttatcaggcgctttatcggaaataccgcccgcagaccttttcggacgttgtggggcaggagcatattaccgaaacgcttaaaaacgagctttctgccggtaaggttacccatgcgtatctgtttacgggcacacgcggcacgggtaaaacctcaaccgcaaaaatattggcaaaggcggtaaattgcctgaaccccaaaaacggcgacccctgccttgagtgtgaaagctgcctatcggttgcaaacggcgagaataccgatattgtggagatagacgcggcttcaaacaacagtgttgacagcatacgcgagctgcgcgaccaggtaaactttgcacccgcttcttcaaaataccgcgtttatattatagatgaggtgcatatgctcaccataagcgcctttaacgcgctgcttaaaacccttgaagaaccgccagagcacgttatttttattcttgccacaaccgaggttcataagctgccagcaactatactttcccgctgccagcggtttgatttcagaagaatagaccccgagcgtatttgcgaaagaatacagtatatagcaggaaaagagggattgaccgtaacagacggcgcagcctctttaatagccgccgcggctgacggcggtatgcgcgacgcgctttccattttagacctgtgcgcctcgggcagtaaaaatatagatgaagaaacggttgaaagcgtttgcggaatggcaggcggcgattaccttttgcaattagccgactgtataaaccgccgcgacgccgagggcgcgctcttactgacggataagctatacaacacctctgttgatatgcagcggcttttatccgagcttacctcgcatttccgcgaccttatgataattaaaaccgtaaaaagcgataataaacccattgtctgctcagaaacacggctgaaagccctaacagagcaggcagccgcctttgatataaaggatattatgcacgcgctttctcttttgcaggcgtccgccgcgggtatgcaaggcggcaaccgccgctgcgaaatggaaatggcgctgatacggctttgcaccccctcgctttcaaacgatttatcctcgcttgaaagaagaataaacgcgctggaaacaggggcggcaaaaatagctccccgcccgcgcgcagaaagccccgcacccgctgtgacgccggagactgagcaggatattccgctgcccgaggctccgcccgatgaacctgccgcacaggttacaaataccggcgatacagagcaggtggaaaccggcgaatgggacgaaataaggcgaatacttaaaacctcctgcccgcttatagcaggcgtgcttaatgaatcaagagcgttcacaaggggaccgtttcttttaattgacgcgccgaatgaaaacttccgctcaatggtaaataacccgatgtaccgcgacgctataagaaaagctgcgctcaatgtgctcggcaaggcttataaattagggccttacaccgcgccgaaagcgcagacggacgaaaaagacccgcttgcggagcttgctggcaagcttaaaaattttgaaataaattaaggagatataaaaaaatgaaagtacgtttacccaactccggcggtgccggcaatatgaatcagatgttaaaacaggcgcagaaaatgcaggctgatatggcagaattacaggctgaccttgagcagcgcgaatataccgcaacctctggcggcggtatgattgaagtaacggttgacggcaagcaccacataaaagcccttaaaatcaaccccgatgcggttgaccctgaggataccgagatgcttgaggaccttataaccgttgcggtgaacgaggctgtatcaaacgcggaaaagaccgccgaggacgaaatgggcgccattaccggcgggcttaatatgccggggcttttctgataatggctaaaaacagtattgtgccgcttaccgagcttatagcccagtttgagcggctgccgggcattggcagaaaaaccgcgcagcgcctggcttacagcattttggagcagccgcccgagcgcgccgaaaaatttgccgaggcgcttgttaacgcgcggcgaaaaatacatttctgcaaggtatgccaggcacttacggatatggacacctgcgccatttgcgccgataccgagcgcgaccacagcgtgatatgcgttgttgccgagccgaaagacgtaattgcgtttgaacgcacgcgggaatataacggcacctaccacgttctgcacggggtaatttccccgcttgacggcataggacccgagcagttgagaataaaggagcttatggcgcgcctttctgacagcggcgtgaccgaaataataatggctaccaaccccacggttgagggggaggcgaccgccagctatttatcccgcctaataaagccgctaggcattaaagtgacccgccttgcctacggcataccagtgggcggcgaccttgaatatgccgacgaatatacccttgcccgcgcgcttgaggggagaaacgaaatctgaatataattcggaatgttgaattcgtaattcggaattaaagaaacgttacctgctgcaacgggcttttctttttattgcccggctgcaaatcaaatataaataattccgcattacgcattacgaattccgcattaaaaaagtggtggatttatgacaaaagagcagattgcccgaataaacgagcttgcaagaaagcaaaaggcagaggggctgacagaggaagaaaaagcggagcagctaaaactgcgcggcgagtatataaacgcctacaagcaaagccttatcgcccagcttgaaaacacatatatattagagccggacggcaccaaaagaaaggtaaggcgcaaggatgatgcagctcctcttaactgataccgcaacccttgaatcgaacaacgacctgccgcttgatgttttcgataaattcggcaaggttacgaaattcgacaatataacccgcaaggagctgctgacggcggcagcggataaggacataatactctgcaacaaaacggttattgacagggaggttatgaacgccgcgcctaatttacgctatatagggcttttcgctacgggctataataatatagatattgccgccgcaaaggaaaagggaattaccgtttgcaatgcgggcagctactctacaaacgccgtgacacagcaggttataggctatattcttatgcactacaccaaaattccgcagtacgatacctttgtaaagcaaggcgggtggaaacgctcgggcgttttttctccgcttattttttcgggcgacgaggtatacggcaagaccctcggaatagtgggttatggaaatataggaaaggcggtggaaaaagccgcagaagggcttggtatgaatgttttggtgcacacaagaaccgtgcgcgaaaacggcaaaaccaaattcgtcgggtttgatacgctgcttgaaaacagcgatattgtaacgctgcactgccccctaaacccgcaaagcgaaaaaatgatgaacgccgcggcttttgcgaaaatgcgtaacggcgctttctttataaacacctcgcgcggcggcacggtggatgaaaacgcgctttttgccgcccttcaaagcggcaagctttcgggcgctgcaatagatgtgctgacaagtgagcccatgccgcccgattgcccgcttacagacgcgccgaatataattatcaccccgcacaccgcttgggcgccgctgcccacaagactgcggcttttggatattgtaagcggcaatataaccgcgtttttaagcggaaacacacaaaaccgaatagtttaatttataccggggcggagaaaaatatgtctgatggtattataggcatgaaaaacggaaagcactttcattttgataatctttttttaaattgtccggtaaagtgcggctttatcgacctgtatcaaataggtgagctttgctgtgaatcaggctatgttattgaagagcatatgcaaacactgtgcgaaataacctatgtaatatccggcagcgggcgcgcatttgtagacggcgagccagtgccgcttacggcgggtgacgctatgataaacagcgtagggcacaggcataaaattgaggccggtaaaaattcatttctgcgctttgcgtatataggctttttattcaacgggaacgccgcaaagaaaaaataccgagatttgactgaaatttataattcctcaccctttaaaattcttaaagcggacagcaccgtttactacccctttataaggctggtggatgagttttaccgcggcgggctgtgcagtgataaaataaccgagtgctattgtgagcaaattataattcacaccgcgcggcttttctttgataaccccgaaaaagcgctgccgcagcgccgtattgaccgcaaaagcacctgcccggcggtatattcggttatacgctatgttgaggaaaatattgaaaacattgaaagtattcacgaaatcgctgcctacgccggctacagctgcacatatctatcccatttattcaaaaacaaaaccggaataaccctcagcgaatatataaggtataaaaaaatagagcgcgcggcgtctcttataagggacggcggaatgtcgccaacacaggcgggcgagattttaaggtatgaaagccttgcctctttctcaaaatcctttaaaagcgttatgggaatttctcccggcaagtatgccgctgactgcaaaaaataatttgtagaaaatcacaatttaacttttttaagtatatctaaattgtaaatgtgaacaaacttttaaaatcagctcgtattttgttgactttagtcgctcagtgtgttacgataataccagcgaaagcgaaacaatttaatatttgccaatataggtttggattgatggtccaaatgtttctaccgcacgccgtataagttgcgactattggtgaagtcagctttaaatgccggctttttaaacgtttttctgcgtttatatattggcaaacagacttacggaagaagtctgttttttttgttttttaaaaatataaaaggagcgcgcctgatgaaagctttagaagaaaaaattctaaaagagggaaaggttcttcccggcaatattctcaaggtgggctcttttttaaatcatcagatagacgttgatttcataatggaaatggggcgcgaaacagcgcggctctttgaaaatgaaaaaataacgaaaattcttactattgagacctcgggcatagcaatagcggtaggcgcgggcgcggcaatgcacgttcctgttgtatttgcgaaaaagcataaatcaagcaatgtttcgggtgaggttttaagcaccgtagttcactcctacacacacggaacggattataccgtggttgttgaaaaggattacataagccccgacgataaaatattattggtagacgattttcttgcaaacggcaaggcgcttttgggacttattgatatagccgagcaggcgggcgccgaggttgtgggcgcttgctgcgctattgaaaaaggctttcagaagggcggagactctctccgcgccgacggaatacgggttgaatcgctcgcggttattgacagtatgagcgacacctcggtcacattccgcaaataaaatacggataatcgcggtttaccgctttatcaaaataaataatttttcggaggaagaaattatgaagaaaattacggcaatgcttctctgccttgcaatgctttttgcttttgcagggtgcggcagcaaggacacaggctccggctcaaccggcaacaacgcaaaaaagggtgtcagcgaggatattcttccgcgtcttgacattaaatcagaggttaccgtacctgacgatttcaaaatcggtatgatctgcctgcacgacgaaaactccacctatgataacaacttcattcaggctttaaagtctgttcagaagggtatgggtcttaaagacgatcaggtagttatagttaccggcatcggcgaagacagcaagtgctacgataccgctgttgaccttgctaaaaataagggctgcaaggttatatttgccgattctttcggtcatgaatcctttatgaagcaggcggctcaggagttcccgaacgttcagttctgccacgctaccggtacttcgggtaagagagccggaattgccaacttccacaatgctttcgcctctatttatgagggcagataccttgcaggtatagctgccggtatgaagctcaacgaaatgattaaagccggcaagataaaggctgaagaggctgttatcggttatgtaggcgcttacacctatgctgaggttatctcaggtatgacttctttcttcctcggcgcacgttctgtttgcgaaaccgctacaatgaaggttcgctacaccggttcttggtacgaccagggcaaggagcaggaagctgctaccgctcttattgaaaaggacaagtgcgttcttataagccagcacgctgactccctcggcgctcccaccgcttgcgagcttgcaggcgttccgaatgtttcctacaacggcagcacctactccgcaggtaagaatactttcatagtttcttccgctatcaactgggcgccttacttccagtacattattgagtgcgctgttaagggacaggctatcgattccgactggtgcggcgatatagctacaaactctgttgtactcagcggtataaacgagggcgttgcagccgaaggcaccgaggctaagatgaaagaagctatcgacgctttcaaggcaggcacactcaaggtatttgctaccgataagttcactgttgacggcaaaaagcttgaccagtatttagctgatgttgacggcgacttcaagggcgagaccaacgttgtacacgacggttactttgatgagtccaacgctaaagacttccgctctgctccttatttcgatattataatcgacggtgttacaaaccttaacaaagaggtttaattaacgctttagatctgactatcccacacaaggggaatattttccccttgtgtattttgatttttaaaacatacagggaggatacttgtgaacgcgcttgaaataagaaacgtaacaaaacgcttcggtaaggtagtagcaaacaagaatataaatcttacggttgaaaagggcgaaatacttgccgtactgggcgaaaacggctcgggcaagactacgcttatgaatatgattgcaggtatctaccaccctgacgagggcgagattcttgtaaacggcgaacacgttgttataaactcgccgaaggacgcttttaacctaaaaataggtatgatccaccagcattttaagcttgtggatgtatttgacgctaccgaaaacatagttttgggaattgacggtgataaacgctttaaccttaaagaggcggcaaagcgggttgccgaaatttcagagaaatacgggtttgaaattgacccgaaaaagaaaatttatcagatgtcggtttcggaaaagcagaccgttgaaataataaaggtgctttaccgcggcgcggatatactgatacttgacgagccgacggcggtgcttaccccgcaggagaccgaaaaacttttcgcggtgctcagaagaatgcgcagcgacggcaagtcgataataataataactcacaaaatgcacgaggtgctttccgtttccgaccgcgtggcgatactccgccgcggcgaatacatagatacggtaataacaaaggaaacgagcgaagccgagcttaccgaaatgatggtgggcaaaaaagtatcacttaacattgacagaacagaacccgaaaaccccgccgagcgccttatgataaaaggtctcgacctttacagcgaagagggcattaaggttcttgatgatatatcattcaccgcaaacagcggcgaaattttaggcattgcaggcattgcgggcagcggtcagcgcgagcttttggaggctattgcgggtcttcagaaaataagcagcggcgaaataatttacaataacccgaaaaccggcgtcgccgaaaacctacgcgacaaaacccccatgcagattcgagagctgggcgtccgtctttcattcgtacctgaggacaggctcggaatggggcttgtgggtaatatggacattgtggataatatgatgctgcgcagctaccgccgcgggcgctctatgttccttaaccgtcagtcgcccaaaaaacttgccgaggatattataaacgaccttgaaattgcaacccccagcgcaaacacccccgtgcgcaggctttcgggcggtaacgtgcaaaaggtgcttgtagggcgcgaaattgcctcctcccccacggtgcttatggcggcgtaccctgtgcgagggcttgatattaactcctcttatatgatatacaatcttctcaatcagcagaagaaaaacggcgttgccgttatattcgtcggtgaggatttagacgttttaattgagctttgcgaccgcattatagttgtaaactcgggcagagttaccggcattgtggacgcaagagaaaccacaaaggaagagctcgggcttttaatgacaaaatcgggaggcaatgaaaatggcaagtgaaaaaaatcttaaacgcgagcctctcgcctatatttcaaaaagggacaatgtttctcttacctaccgcatagcggtgcgggctatagcaattgttttggcgcttatagcctgcggtatagtcaccaaggtgctaacaggcgataaccctatctcgatttatcagacgatagttcacggcgctgtgggcaagggtagactgcttgttacaattcacgatattgcaattctcctttgcatatccttagcggtaacccccgccttccgtatgcgcttttggaacacgggcgcagagggtcaggtgcttataggctgccttgccaccgccgcgtgtatgttctggctcggcggcaaggttccgaacggtgtgctaattcttattatgaccgtttccgccatagtttcgggtatgatttggggcgttattcccgcaatattcaaggcgcagtggaaaactaacgaaacgcttttcacccttatgatgaactacgttgcaattcagcttgttgaatatttccttaaaatagccgataaaagcggctcaaacgttgtaggacccgaccttttatcccacggctggctgcccgatattttcggggtgaaatatctgcttaacattataattgttgcggttattaccgttttaatgcagatatatcttaaatacagcaagcacggctacgaaatttcggttgtgggcgagagcgaaaacaccgcgcgctacataggcataaacgttaaaaaggttattatccgcacaatgctggtgtcgggcgctatatgcgggcttgcgggtcttttacttgtgggcggttcttcccactctatcgattcaaatctggtaggcggcagaggctttaccgccataatggtttcgtggctcggcaagtttaatcccattacaatgattttaaccaccctgctgctcgtctttttggggcgcggcgcagacgaggttacctctaaattcggtctgaacggcgatttttccgatattttaaccggaataattcttttcttcataatcggctgtgaattttttataaattataaaatcaacttcagccaccgtaaaaaggaggagaaataatgttaactgttattaactttatacaacgtgccattttgcagggcacacccttactttacggcgctaccggcgaaattttaaccgaaaaatccggaaaccttaacctcggcatacccggcattatgtatatcggcgcaatatcgggcgttgtgggcggctttatgtaccagacctcaaccgatgaggtagtgcccataatagcggttttaattccgtttttgtgctgccttttaggctcgctgctcgtgtcgcttctttattgctttttaaccgtaacattaagggctaatcaaaacgttacaggtcttgcaattaccaccttcggcgtgggctgcggcaacttcttcggcggctcgcttattaaaattataaaaagcgacgttccctaccttgcactggtcgatattgcaagagcatttaaaaccacgctgccctttgctgaaaacacgggcgatataggcaagcttttcttctcctacggctttatggtgtaccttgcaattatcatcgccattatctcggcggtgtttcttaaaaagacaaagcacgggcttaacctgcgtgcggtgggcgaaaaccctgccacggctgacgctgctggcattaacgtaactcgctataaatattttgccacctgcataggcggtatgatagcagggctgggcggacttttctatgtaatggattactgcaacggcatttggtccaacaacggtttcggcgaccgcggctggcttgcaatagcaatagttatttttgccacatggaagccctcgcttgcaatactcggctcttacctgtttggcgcgctttatattcttttcaactatataaacgtgcccatgcaaatgattccgctgattcaaatgctgccctatgtggtaacaataatcgtgcttatagtggtaagcatacgcaagcgccgcgaaaatcaacccccggcgcacttagggctttcatatttccgcgaggaaagataaaaaagtacttacatttattttcaaaatgtggtaaaatataaacatagctttttccggcgtgcctgaaaacggctcgccggatttttatgttaaagaagggtgaaaattgtttgaaaaaggggaaaaaattatatacggtaaaaccggagtgtgtgtggtagaggatattgccgaaagggcggttcccggcgggaaaaggctttactataccctgcggccgctgtatcagtcgggcaatgtgatttttgccccggcagacagcgataaaatttttatgcgccccattattaccaggcaggacgccgaaaagctgattgaagacgttccgaaaatcagagaaagtgcgctgtcggacggattttccgacgaaacggaaattcgcagctgtgaggagcttttgcagcttgccatatctatttatgaaaggcgtaaagaggcgcgccgtatgaaacgaaagctgagctttacatatgaaaatcggctgcacagggcagaacaggtgcttttcggcgagcttgccgcggttttggaggttgagcccgaaagcgtgccggggctgctgtttgcggctattaaagactgaaaggaatttttttatggcggaacagaaaaacctagaaactctaagtgctgaaatacttgcagccgaggaaagggaagcggaacgcttttcctcatcgctttatgaaaggcttgcaagccagaacagtatgaccgccgaggagcaggcggctttggcagaggaagtggataatgaggttaaggcgcttgaaaatacctcaacccgacttaaaaaggcgcataaatgggcatttgaccaggcagacgagctgcgcacaaggctgaaagagggcaaaaccagcgacagccgcgagcttataattcgccgcgcccccgcaaattccgttattgactacgaggaagaaaagaccaaaaactttgccgcaggcgttaatttctacaaaattgcaataatacttatttcgggcagctttgcgggcgttattattgaaatgctgtggtgctttatccgccacggctattttgagagccgcgcggggcttgtgtacggtccttttaatttactttacggcgtaggcgctacggcgcttacactgctgctttaccgctacagaaaccgcagctcctcaatatccttcttcggcggaatgataataggcagcgcggtggaatatctgctctcttgggcgca

SEQ ID NO: 4459 - DNA, 11687 bp, Unknown
  16S sequences of unknown bacteria
cttcatgtacctttacctgcttacagaaagtgaatttgttttacccgataccggcctttgccgctgcttcggccttcgcgtcgttcgagtgcagaagggccgcgtggaagagctgctgctcctgcccgacatctccgccgatcgctcctttgtcatgcacctggcgcagctgtttaccagactgcagcccgcgccggttcatttgcgtgatatcctgcaggatatgctctaaaacgcagcctggccgcccaacgcggaacaggagcagccacagccccatatttcccccggcctgcgccgccgtttcggcaactggttgccgcccgcacccttcggtgcaggcggttttttcatgctgctcgggcgaatttgttcgtgacagcggggcaaaagggtagtataataaagtgatttggtatcgctgcccgaagggcggcagcgcaaaaaatacaaaccggaaaggagcgctcggcagtgaaatttcagcagtggcatatccacgcctcggacgagggcgccgtgcgcgccctgatggaagccggctatccctatctcatttccactgtgcttgcacccaggggcgtaagcgcgccggaggaagcggagtctttgctgcactgcggcgaacgcctgaccctggacccgcttttgatgcgcgacatggacaaggccgtcgcgcgcatccgcgccgccgtggccagaggcgaaaaaatcgccgtgttcggcgactacgacgtggacggtatcaccgccacctgcctgatgaccgacgccctgcgccgcgccggggcggacgtgacctattatatcccccaccgtctggacgacggctacggcctcaacaccccggcgctggaaaagctgcgcgccgaaggagccgcgctggtcgtcacggtggactgcggcatcaccggcgtggccgaagccgatttcgcccgggacatcggcctggatctggtaatcaccgaccaccatgagtgccgcgaggcgctgcctcaggccgccgccgtggtggatccccaccgaccggactgcccctatcccttcaaaaacctggccggcgtgggcgtggcgctgaagctggccatggctctggcggggccggagggggcggaggacgccttccggcgctactgcaccctggccgccattggcacggtggccgacgtgatgagcatgaccggggaaaaccgcaccatcgtccactgcggcctgcaggctctgccccaatccccctgcatcgggctgcacgccctgctgcgtcaggcgggactggagggcaaagccgtcacttccacctccatcggcttcgtgctctcgccccgcatcaacgccgccgggcgcatgggccaggcggacacggcggcggaactgtttctcaccggcgacagcggccgggcggaggaactggccagggaactgtgcgaactcaaccgggagcgccagctggtggagcagcagattttcgccgaggccgaggcgcgcatcgccgccctgccggagtgcgagcgcagcgcgctggtgctggaaagcgacacctggcaccagggcgtggtgggcatcgtggcctcccgcctgagcgagaaatattcctgccccagttttatgatccatttgagcggggaggtgggcaaaggttcctgccgcagcttcggcggcttcaacctgttcgccgccctggaacaatgccaggaactgctgctgggcttcggcggccacgagctggccgccggctttaccatcgaaaaagaaaacattccggcattccgggaaaaaatgaatgaatgtgtgcgccgcagcttcggcgcagcgcgccccgtctcctgcctggaggtggatgctgtaatcacccgcccgtcccttctgagcctgggcgaggtggaggctctttccgccctggaaccctacggcgcagacaatccgcgccccctgttctgcattcaggggctgacggtggacagcctgcagaacgtgggccagaacaggcacctgaagctgcgcttttccaagggcagcgtgcagctggacggcatcttcttttccgccaccgccgagacctgcggagcagggcagggggaccgggtggacgcggcgttctatctgaacgtgaacgagttccgctcccggtgcaccgtgcagctgcagctggcagacctgcgcctgtcccgggaacccagcgtgcgggaacgggaagatctggaacggctgggccgctttttcggcggccagggactgaccccccaggaggccatacacctgctgcccgaacgggttcagttcgccgcctgctggcgcgcgctggatcgtttcctgcccccggagggggcgctgcaggcggcctatcttccgctgctgcgcaagctggaaaagggtctgggcggcgtggatcccttcgcacgcgccgccgtgtgcctgcaggtgttctgcgagcgcgggcttctgcagatggaagggacaggggatgagcgcagtttcgcgcgcgtacccatttcgggcaaggcagatctggaagcctcaccctatctacagacattgcgcgccatactcggcaggaggtgagagaccatgacggcagaagaactcagcagcgtcaacgaacgctacgaagccctggaggcgtctatccgcacctataaccccaacgcggattttgacaaaatccgccgcgcctttgcgtacgcccgggacaaacacatccaccagcgccgcaaggacggctcgccctatatcacccatcccctggccgtggcccaggtggtgtccgacatgcatctggacagcgagtccatcatggccgccctgctgcacgactgcatcgaggacaccgacgccacccatgaggaaatcgccaagctgttttccccggcggtggcggaactggtggagggcgtgaccaaactgacgcgggtgcagtatgtcagcaaagaagaagagcagatggaaaacctgcgcaaaatgctgatggccatgagcaaggacatccgtgtcattctggtgaaaattgccgaccggctgcacaatatgcgcaccatggactaccagaccgcggaaaagcagaagcagaaatccctcgaaaccatggagatttacgcgcccctggcccaccgcctcggtatgcagaaggtgaaatgggagctggaagaccggtcgctgcgctacctcgaccctgtaggctaccgggacatcaacgacaggctggaagtccaccgcgccgagcacgaagctttcatggctcacatccagagccagattgaagaacgcctcaaagagattcaggtggattacaccaaagtctacggccgcattaagcacacatacagcatttaccgcaaaatgtattcccagggaaaaacccttgagcagatttacgacctgttcgccttccgcgttatcgtgaaaaccattcccgactgctacaacgtcctcggcgtgatgcacgacctctataaacccgtgctgggccgtttcaaagactatatcggcaccccaaagcccaacatgtaccagtctctgcacaccacagtcatcggcgacgagggcatccccttcgaggtgcagatccgcaccgaggaaatgcaccagatcgccgaatacggtatcgccgcccactggaaatacaagcagaacggccagggcgccggcagcgaacacacctatgaatgggtgcgcaagcttctggaaaatcaggaaagctccgacgccgaggaatttatccacaatttgaaagtggatatgtttgccgacgaggtgttcgtgttcacccccagcggcgacgtggtgaacctgcccgccggcgccacccccatcgactttgcctactccatccactccgccgtgggcaactccatggtgtcctgcaaagtgaacaaccgcatcgtcacttttgactacccgctgcagaacggcgacattgtggaagtggtcacctccaaggccgcccacggccccagccgcgactggatgaacatcgccaagagcagcgaggcccgcaacaagatccgccagtggttcaagaaggaaaagcgggaagaaaacgtggcccggggcaaactgagctttgattccgagctcaagcacgccgggctgaccctgtcggaaatcaccacttgggaaaacctcccggcggtgctcaaaaaaatgtcttatggctccatcgacgatctgtacgccgccatcggctacggcggactttcgtccctgaaagccgtcaaccgcatccgggatgagctgtggcgcgagcgccgcaccgcccaggcggcccagaaagccgccgagatgaaagagctgtcccgcagcgccgcagcgccgactccggcgccgcccgtcaagcgccacagcgaaaacggcgtcattgtggagggcctgggcaactgcctggtcaaattcgccaagtgctgcgccccggtgcccggcgaccccatcgtgggttttgtcacccggggctacggcgtgtccgtccaccgggcggactgccccaatgcccgccacaacagcaaggatcccgaagaagctgcccgctgggtcaaagtcgcctggggcagcgacacccgggagagctatcagaccagccttgaactggtgtccaaagaccgcgacgggctggtactggatatttccgccatgctttccacggccaaggtgcgggtgctgactttctcctcccgcggcatgccggatggctttgccatcacctccatcgtgctggaggtcaccggctcggaacagctggaactgctgatgaaaaagctcaaaggcatccagggcgttatggacgtcaagcggcccacaggctgagggccgtcctgcgcagatattcttactgcagaagatccgccgggcggaccggaggttcggcgtctgcggtcgggcggaaatcggctgcgatctgccggaaatcctccggccgcgccagctccatacccagatagaccccgtgggcaaatgcctcgcaggagcatggatcccgaaacagcagcaccgcgttaaacatccccaggcgcatctttttcggcaccagcagggagcgaagcgcctccgtgagccagccatcgtcaaaagccgcctgctgttccagaaacggcgcggcataatgataaaacagccattcgtaagatgggttcatggcaaatacctcctctccaaaggtataacatcatattatgatgcctttatttaatcataaaaagatatgccaaggggtgtattatggaaacacttttacctggtttatccgtccgtttgaaagcgctccgtcaggaaaaggggctgaaacaggtggaaatggccgcttttttggaatgcaccgaaggccattatcaaaaaattgaatacggcaaaatcaatctcccgacattgacgctgatcaaattggctgatttctttgatgttaccaccgactatcttctcggccgcacggaaaaccgcgccgtcaaccggtaaaccgccgcatcgcttccccgcccgcacccgtcagcggcagcggcgcaggcgggtaaaccagtccgcacagcaccaaggtgctgccatcagaccatcgacacaaaggaaaaagaagcagctttcctcacgaaaggagaatccaaccatgcgcgcagtcgtcacaagagtatcctccgcctccgtcgccatcggcggacaggtgaggggacaaatcgaacagggctttctcgtgctgctgggcgtcggtcccaacgacaccgaggaaaccgccgtcaaactggcggaaaaaatctgccgtttgcgggttttttccgatgaaaacgggaaaatgaaccgggatctggccgccgtggacggagcacttctggtggtgtctcagttcacgctgtacgccgacaccaagtcccgccggccgggtttcaccggcgcggccaagccggatctggccgcagcgctgtatgagcgctttatggaagcctgccgggcccagggtttccccgtggaacacggcgaattcggcgcggatatgcaggtcgaatcggtcaacgacggcccggtaaccattttgtttgatacagcgcagcccttttaggacactgcagaaatgaccctacaaaaaaggaggacgaaacaatggaagtaaaaacttatcaggtgggccaaatcggcaccaattgttatttcgtgggcgacgaagcttcaaagaaaggctgcatgatcgatcccggcgacgaggcagaaaacctgatccgcctgtggggcgctttcggctacgagctttccgccattctggtaacccacggccactttgaccacaccaccgccctggccgctgtggccgcggctttccccgccaccccggtctatatccgccgcgaagacgtgtgcgagggcggccggccggaattctggcagtgcgcccatgtaagcggcatgcgctatgtcaaagacggggacaccattgccgtgggcaacctgatcttcaccgtgatcgaaacgccgggccacacccccggcggcgcggtattcaaaaccgccggcgcgctgttcaccggcgacaccctgtttgccggcagctgcggccgcgtggattttcccggcagcgactggggccagatgtgcgcctccctgcgccgtctggatgcgctggaaggcgattataccgtctatcccggccatgagtggagcaccaccctctcccgggaacgggccggcaacccctatatccgctcggcccggcagctggggaacatatgaaactaactctgaccggccacagctacaaatacgccgtggaacagatcatgaccgtgctgttccccggcgaaaaaccagactacggccagtgggaccgcagagaggaaaactgcgccgcggtggagctgtctgaaggtctggtatgggtcacagccaccacccggctcaaccggaacggaacgcgcgccataggcgtcagccgcgccctgcgctctgccctggaaaccgatgaactggcccgggaccgggtatgtcagcgtatcctgaagctgagcttctttaaagccgctgtcaccctcaccggggaaatccccccctggggcgcgctgacggggattcgcccggcccgcatgctcacccgcatgatggatcagggcatgggcgaaaaagaggctctggcggccctgtgcgcggaatactttgtctcccccgatcgggcaaaactgtgcctgtccaccgcccgggccagccgcaaagcccaggcggcgctgcgggaggatgaattttccctgtacgtgggcatcccattttgtcccacccgctgcgcctactgctcctttgtcagcgcatcggtggaaaaaacgtttgccatgatcgggccgtatctcgacgctctgtgccgcgaaatcgccttgatgggcagcgcagcggcggagctggggctgaaggtcaaatccctctacatcggcggcggcacgcccaccacgctgtcccccgcacagctgcaaaccctgctgcgcgctctggcgcagcacttcgacctgtcccgcctgtgtgaatacacggtagaagcaggccgccccgacaccgtgacggcggaaaagctggccgtgctggcggaaaacggcgtcacccgcgtcagcatcaatccccagaccatggaagaggccgtgctggaggccatcggccgccgtcacagcgccgcagacgtgtaccaggccatggagctggccaaagcctccggcattccccacatcaatatggacctgatcgcgggcctgcccaccgatacgcccgaaggtttttcccgcacgctggacaaatgcctggccctggcgccggacaacctgaccgtgcacaccctggccctgaaaaaaggctcgcgcatcctgctggacggtttgcccgttcccggcgcagccgaggtggggcagatgctggactactccgccgcgcacctgagccaggcgggttatacgccttactatctgtaccggcagaaatacatgtccggcaatttcgaaaacgtgggctggagcaagcccggcgccgaagggctgtataatatctatattatggaagagctgcactcgatcctctctgtgggcgcgggcggctccaccaaactggtggacccgcgcaccgggcacatcgtgcggcacttcaactgcaaatatgccaaagaatacctggaaaaaccggaaaaatggacccagaaccgcgcgcagttcttcgcctttgagcgcgcgctgctccgcgattacggcctgcttccggaggaaaacacggaagggagcgattcttaacatggaacacgaagccttttggaaaacactggacgccgcccgcgaggccgcgcagagggccgggcagtccgctggcgaggcgctggacgccctgtctgccgccgcccgggacgccgatctttacgagcgctgccgcgccggcgcagaatacctgcaaaaacagttgggaaactttcgtcccgaagttctcctgattctcggctccggcctgggttttctgggcgatgaggtggaacaccccgcttttgcggagtacagcgccatcccctatttcaaacattccaccgcgccgggccaccggggccgcttcgtattcggcacccttcgcggcaaacgcgtggccgtgatgcagggccggatgcacacttatgaaggctggtccatggctgatgccgcccagggcgtgcgcgtcctgcgcctgctcggcgcacagacgctgatcgtcaccaacgccgccggcgcagtgaacacagccttccatgccggcgacattatgctgatccgcgaccacatcaagctcttcggcggcagccctctgaccgggccgaatccggagggcctcggcccccgcttcccggacatgacgcacgcctacactccggcgctgcaggaggccgcccgccggagcgccgcagaactgggactcacgctgcgcgaaggcgtttacatgttcttccccggacctcagtatgaaacgccggcggaaatccgcgccgcccgcattctgggcgcagacgccgttggcatgagcacggtgcccgaggtcatcgccgccgcccattgcggcatgcaggtgctgggcctgagcctgtgcaccaatatggccgccggcatcctcgaccggcccctgaccgaacaggaggtttttgatgccgccgaggccgccaagaaacccttctccaacctgatccgcacgacactggaaaaactgtgacacgatgcggggcgcccggagcgcgccgatttgaaacgaaaggaaggcaaataacatgaccattctcttctcccacgcaacggttttgtgcatggacgaggcaggcaccgtgctgcaggacggctatgtccttgtccgcggccgggagatcgcctacgtcggtcccattcggcctcaggagcgcgccgaccgtgaggtgaacgccaccggaaaagtactcatgcccggatttgtggacgctcacacccacctcaccatgtccctgatgcggggctatggcggcggccacgacctgcagacctggctcaacgactacatcttccccgtggaagccaaactggacagccgtgccgtgcgcgccggcaccgctctttccctggccgaagccatcgccggcggcgtcacctccgtgtccgatatgtattacttctgcgacgatattatcgccgaagtcgtaaaaagcggcatcagcgccaacatcgcccggggcgccacggtgttcaccgaagatttctttccccccccgcctgtgccgaaacccgccagctcacggaaaagtggcacaactacaacgacgggcagatcaaaatcgacgcctgcatccacggcgaatacacctccaatcccaagctgtggacctggatggctgactttgcccgcagccacggcctgcagatgcacgtccacctgtctgaaaccaaagccgagcaggagggctgcctgcagcgccacggcatgacccccgccgccgtatttgagcgctacggtctgtgggacaccccagccatcgccgcccactgcgtgtggaccactccggaagactgggaaatcctccgccgccatggtgtcaccgccgtgcataacccggcgtccaacatgaagctggcctccggcgccgcgccggtggcacagctgctcaccgccggcgtcaatgtggcactgggtaccgacggcatgagttccaacgacaaccacagtatgtttgaagaaatgaagctggccgcgctgctggcccgggtgacgagcctcgaccccctggctctgcgcgacgatactgtgctgaaaatggccactgtgaacggcgcccgcgcccagggccgccacgccggcgtggtggccgcaggctatcaggcggatttgatcctcgtggatctgcgcgcgccgaacctgcagccctgccacgacgtaaagtcaaatctgatctatgccgccaacgcttccaatgtatgcatgaatatggcgcggggaacgatcatatatgaaaatgggaacttcctgacgctggatctcgatgagatcctgcgggaagtggaacgctatgccgttcccaaactattttcctgacaggcccgccccagcgctgcgcggggccgtcctggacagaccgggaggacgtcggagctgatggggcatttttcgcacaaacagaactttctcggcggcgtggccgtgctgaccatggcggtggtggtggtgaagctgatttccgccgtgtataaaatccctctgggcaatctgctggacgacgagggtatggggcatttcaatatcgcctataatgtgtacaattttctcctgcagttgtctaccgcaggctttcccctggcgctgagcaaaatgaccagcgaggccatggccctggggcacttcaaccaggcgcggcgccagttccgtgtggcggcagtcctgttttttgtgctgggtgcggcggcctccgccgtcatgttcttctgcgccggccctctggcggagctgatgaacgactccctggcttattatcccattaaggttctttccccggcggtgtttttcgtgtgcctgatcgggtgtttccggggctatacccaaggccggggcaacatggtacccacagcggcttcccaggtgctggaggccaccttcaagcttttcatcggcctggggctggcctggtatgtgctgaacacgctttccgtcagcgtggagatcggtgcggcagccgccatcttcggcgtgaccgtcggctcgacggcggcggcgctctttctgatcacctggctgctgcgccatcgcctgagcagcagaagcggcgagcaggcccagcgcgccggtccgattctcaaaaagctgctgctcatcggcgtgcccatcacccttggctccagtgtgatgagcatcattacactggtggatcagacggtggtcatggcccggctgcagaacgggctcggcctggccgaacaggcggccgccgcgctgtacgggcagtataccttcggcatgactctgttcaacctgccggccaccttcgtctatccggtcaccgtcagcctgattcccgccgtcagcgcagcgctgacacgccaaaacacgcttcaggccaaccgcatcatctcctcttcctttcgactcatcgcattgttctcgctgccggcgggcgttgggctgtcggtgctggctcaaccgatcctgcagctgttgtatccagcggtgccggacacagccgcagccgcagcctatcatctgcagatcctcggtgcggcagcgggatt

SEQ ID NO: 4460 - DNA, 11636 bp, Unknown
  16S sequences of unknown bacteria
gtttttgaccgttatcatcaactatatggccaactactccatgcgcaacaacgatgcccgttcggcaaaagctgagatcctgttcaccgatctggtggatatggtgaaaaacgatgaagtcgcctcagtttccttcacagatgaactgatcaacatcacccctgtggaagggtatatctatacggatcccgacggacaggagtacaccggcaacattaccctgtacacctccatcattaacagttccaacctctttacactgctcgacgagcatgatgtgccctataccaaaccttatgtggccaaaatgtctccggtgctcagtgtactgctcagcatggccccgttcctgctgatcctgggtcttacgttctttatgttccgcggcgtgggcggaaagggcggcatgggcggcatgatgaatgtaggcaaggccaacgccaaggtatatatggaaaaatccaccggcgtaacctttgccgatgtggcgggccaagacgaggccaaggaaagtctggtggagatcatcgatttccttcacaaccccggaaaatatactgccatcggtgcaaagctgcccaagggcgcgctgctggtcggttcgccgggcaccggcaaaaccctgctggccaaagccgtagccggcgaggcaaaagttccctttttctccatctccggttcagactttgtggaaatgttcgtgggcgtgggtgcttcccgtgtgcgcgacctctttaaggaagcagccaaagtggctccctgcattatctttatcgacgaaatcgacacgatcggcaagagccgcgacgccagcaaattcggcggaaacgacgagcgcgaacagactctcaaccagctgctgtccgaactggatggctttgaccccagcaaaggtatcattgtgctgggtgctacaaaccgccccgaggtgctggataaagccctgctgcgccccggccgtttcgaccggcgcatcactgtggaccgtcccaatctggccggccgtttggctacgctgcaggtgcacacccgcaatatccgcctgagcgaggacgtagatctcaacaagattgcccaggccaccgccggatgcgtgggcgccgaccttgccaacctggtcaacgaagcagctctgcgcgctgtacggctgggccgccacgcggtgaaccagaacgatctgctggtgtcttttgaaacggtcattgccggcagtgaaaagaaaggcaccgtgcttacggaaaaggaaaagcgtctggtggcataccatgaagtgggccacgccctggtggcagctatgcagaaaggcactgaaccggtgcagaaaatcaccatcgtcccccatacccagggcgctttgggctacaccatgcagacccccgaggaagagcgcttcctgatggaccgcgacgagatctatgctgaactgcgcatcctgctcggcggccgcgccgcagaaaaagtagcattcaacaccatgaccaccggcgcatccaacgatattgagcgcgccaccgacctggcccgtaaaatgattaccatgtacggtatgagcgataaattcggtgtaatggggctggccacgatccagaatcagtatttggacggccagatgggcctgacctgcgctcaggatacggctgctgaagtggatgatgagattcatgctgttctgatgcactgcttcggagaagccgtacagatcctggaggataaccgcaccctgcttgacgagattgcaggatacctgttgatcaaagagacaatcaccggcgcggaaatgatgtcttttattcacaatgaacctattgcagcagagcctgcaccggcggcacagtccgacgacgcagcagcagaagatccttctgccgtccctgccggcgaaacgcgcagcagcgcggacgacgcaccggcagaagcgtcgccggagccgcccgccgacagcacaccgccgacaacgccggccccctcctccgaggagtcttcttcccggctgaacgaagatcatctataagagttcccccagcaaacattcccgctgcaagcagaaataaaataatagaaacgccgcctttcgtttcaacgaaaggcggcgtttgcttttctttgttatcctaccagggaagacagtgccttcatcaggctttcgttgcgggtagcagatacattgttcaggaacagcacatccgtcgcaccggtctcttccaccagagccgcaagtttttcactcttcactttactgatatagcggtagtccaccacatacaccttctgataatccggaaccaggaagggaacaaaggcgttgccgaaggattccttgacgacgatgcaagtgctgccgtccgtcttgttggggttctcgatcaccgtccagggattgtcgccgccaataaagcaggagtatttcgatgaagcgttccaggtgctcacatcagacaccaccatccattgcacgctgctcccatcgctggctgtgaaacgcagactgttggtgtcgttgggcttatatgcagttaccgtatcgccgccggcaagcgccgcatttttgcccgaatcactgtaaaacgaccccaggaaacccgggtattccaccgcggtaaagtctttttccagatccgccggctccgtcccgcgcgccctgcagtaatcctgataggcgtaataagcacccaacgccgtccagtgatggtcggtacggaaataaatgtactcatcgcggtgattgcgcagcgtgtcgtacacatccaccttccgaaccgcttccgacaacgatccatacatataatcgagcgctttgcgctggtcggaagaattgacgctcttgcgcaccgaagccggcagtgtgatatccatgctggtagggacaatcatatcgtatacattcgccttgccagccaactgggatgcagccttgttgacagctgcggtgtacatatccgccgcactctggctgaaattgtaatactcatacgccgtatcaccagcaatcagaatggcgcccaacgtctccacgggaacatcggtcatatccggctcttcaatctcatgagatggttcctcttccccgttggcaggaagatcggcttcttctcccccggaaggttcctgcgtggaggcgtcgtccgccggaggcgcgacaggctgatcgggaatctcatcgccctgccccacttcgccgtgtaccgtagtgccggagggcgacagcagcgccttaaactggccgttcagcgacacatatacgtcccggaacggaaaggtgtcggcaaaccaggtattgatatcgtcaaaataatcgcccgaggtcagcgctgcccagctgaacgcgggaaactgcgccaaatcacgcttctccgcctccgaagttttcgggtgcagcggaatgatccaggatatcacggcaagcagaaacaacgcggcaaaaaacacgccgatctgtacgctgcgatagcttcccacccgcttttccggctcctgctgcatctgcgtcccttcccatctgatatagggggaacgattctgttttctcataataggctttcctccgatcagaatttccagtacagaaacggattatagctgtcgcccaccagcgtcatggtggccagcaggagcaacagcaccggcgccgccaccaccaccgtgcggtaaatgccccaagcaaggcccgagtgtgcgctgtgctcgtacagccgccggcccagccaaggcacaataggcgtacaggccaaggttgaaatcagcaaaattggcaggttgctgcgcaccagcgccagcacttcaaaactggaaacaccggcagcggtatgtccaaacatcccggaaagtaccgcgcccagcacagaaaaatctgtaaacttgaacagcacccagccgaaatagaccacgatcagcgcatacacatgtccgaacacatgcggcacacgttccaaaacacggcgcaggaacgcccgttccagcagcagaaaggcaaagtagtacagcccccagcacataaaattccagctggcgccgtgccagaaacccgtcaaaaaccagaccacaaaaagattgaaaaccacccgacccgcgctgcagcggtttccgcccagagggatgtaaacgtaatcccggaaaaagctgctcaaagaaatatgccagcgccgccagaaatcggtgatggacagggaaatatagggataattgaaattttcccggtagtggaagccgatcatgcgccccattccgatggccatgtcggaataggcggaaaagtcaagatagatctgcagcataaaggcaaatgcgcccacccacagggccagcaccggccgttgagcaatcgtgtgaagcgcttcggccgtgccgacagaatccgccaccaaaagctgatcggccaaagcaccgcaagcattggccagcaccgcctttttcgccagccccaccgtaaagcgggtgacaccgtaggagatatcggcgcggctggccttgcgctgcagcagctcagcattgatatccttatagcggacaatagggccggcaatgcactggtggaacaggctcacatacagcaggagcgtcggaaagctcctctgcgcccgcacttcgccccgatatacatccaccacataggatagaagctggaacgtgtaaaaggaaataccaatgggcagcgcaatctgcaccaccgagtcgggaaagccgaacagattatgcgtattctccaaaaagaatgtaccgtatttgaaaataccgagcagacccagattgaccagacatgtgagcaccaccccgcgcttggccgccgccgagcgcaccggctgggcactgatgtagagcgccaggatccagtcggcaaaggccattgccaacagcaaaaacacatacaccggttctccccacgcataaaagatcagcgagaagatcatcatcaccgtgttcttggcacgcatagagggcatcaggtgataaatcaacaggttcagcggcaaaaacacatatagaaaaaacaagctggaaaaaaccatgggcaatactcctcagttcgaaatctgatttttgaataaacgcacgaaagacggagcatcccgctccgtccgccccagccactgcagggccgccgtgtatctcattgtccgccggggatgtttcaaaaatgtatcatttccccccgtttgcgcaaaaaaacagaaaagaactattttttctcctcgtgccgttcttttttgcgcagtttcgcggcattttttcttttaatttaatataatatagtgtccgcagcaaaaagtcaatggcggctcctttggaattttcttcccggataccggacttttttaggcaaaaaacaatttgagggcttgacaatttttccagatcttatataataatatagcttgtattttaatatacaggcttttgcccgtacagggcagcatccttgcccgcaccggagagtgcgggccaaaagaccagaaggaggtgtactgaaaatggctaaggtttctgcaaagtatgaggttgtctacatcgtcaatcccaccaagagcgaagaagagactgcggctctggtcgcaaagttcacggctcttgccgagcagcacgccagcgctgttgaagtcgaggaatggggcaagcgcaagctggcctacgaaatcgacgaccagacggaaggctattatgtcctgatgtctttcagcagcggcgctgaattccccgccgagctggaccgcgtgttcggcattaccgacggcatcatgcgctccatgatcgtctgcagaggcgaataaggaggaagcggtatgctcaatcgcattatcatcatgggtcgcttggcccgtgatcccgaactgcggcgcacgcagagcggcgtccctgtggcgtctttccgcttggcggtggatcgggatttcaaagacaagtctaccggcgaacgctccaccgactggatcgacgtagttgcctggcgggccaccgcagagtttgtcagccgctttttcaccaagggccgcatggccgtggtggaaggccgtctgcaaatgcgcgactggaccgacaaggacggcaacaaacgtgtggccgcagaggttgtcgctgacaatgtgtatttcggcgacagcaagcgcgacggcgatgccccgtcctacggcggcagctacggcagcgcccccggctatggcgcgccggccgacagcggctacggcgcaccgcctcaaggcggttacggcactcccagcgtaggagcgtcggaattcgctgaaatcgacgatgtggacggcgaattgccgttctgaccttgatactcaagaaaaggaggaactgaaatggctatggaacgcgagaacagaggtccccgcacccgcaagcgcagaaaggtttgccagttctgcgccgacaagtgcgattggattgattataaagatgcagccaagctgcaccgttatatttccgagcgcggcaagattctgccccgccgcaccaccggcacctgcgccatgcaccagcgcgagctgaccgtggcaatcaagcgcgcccgtcagattgctctgctgccttttgtgacagattaaactacgcagtaaaaatgcggaagccagactggcttccgcattttttaatggctttgcgccgaaatacgctcaaatcaggccgtacaaaccagtctcagtcaaggccaaacgaacgtatctgccccgcttttatcggcgggcgcacaaaaagcagccgcatacgcggctgcttttttatcttcttttttcttccagcgctgcagcgcggcccacggggtcaagagcaccggcagcctggtaaagcaacgcattgcaaatcgcagcggccaccgtgctgccgcccttgcgccccagcgcagctatgcaggggatctcctgctcccggcacaggcgcaaaatgcgatctttgctctccaccacattgacgaaacccaccggcactgcaacgaccagggccgggcggaagcccgatgcaatctgttcacacagagccaacaacgccgtgggggcgttgcccactgccaccgccgcgccgggatactcccgagcggcccgctccatggacaccgccgcccgggtgaggcagcgctccttcgcttcggcagccactgccgggtcagccatatagcacagcgcttccatgcccaacttgcgcagagctggcctgctgaggccggagagggccatattggtgtccgtaatcagagacacccccgcggcaaaagccgctctggcccgcaccgcagcatgttctgtaaacgacagggtctgcacatagtcaaaatccgccgtggcgtggattacacgtttgatcactgcctcctgttccagcggcaggcatacgccacgccgacaaagctcttcgtcaatgatccgcatgctttcgcgctcgatatctgcgccctgctgataaacaattttcaaaactccacaccccttctggctggaatccccctttcataggggtgcttgcagcaacggcactccgtttcgtaatcggcgcacaagcgcatccagtccgccggcacgcggccagtgagcacaacctctcgcccggcaggccgctccaacaccgcctcgtgcagcagcgcccgatccaccatatcctgctgccaaacggcacaggcctcgtccagaatcagcacctgcggttccagcgccagcgccatacgaaggtgcgccgtctgcagctcggcggcgtgttcccgctctgctgcgctcatttgacggacaaacttttgacagcccttgccgcggaatatatgggcgccgagctgccgcagcagcgctacctcgccgctgttcccttctttcaaaaactgcaccaccgctacagaatggcccgcccccaacgcccgcagcgccaagcccaaagcggcagtggttttgcccttgcctccgccccagtaaaggtggacaagccctaattccgtgttgcgctccattgtctgcatcacactcccatgctttgataaattgcatccacgtccagcgcagcacgtacgccgtcggccagagcatcaaactgacgctcctcataagcccgatggctgatagtcggcggcgcggtcgccgggatgccccggcgtgcacacaaaaactgcaccagacgctccgtcaacgccccggtatcaaacagaccatggagataggttccccacaccagaccgcggcagcaaccgtctttgcgcccatcttccagcgtgcagaaaggagcgccccggctttctgtacggcccatatggatctcatacccttccagccgcgccccggcaaagggttccgccagtgccacagcggcaggccgggtgcgtgttttttcgccggtgaacaccgtccgcaccggcagcagccccaaaccgcgcaggctgcgcgaacgaccgctctcggtaccttcgggatcgtccaccgtttctcccagcatctgataaccgccgcacacgcccagaatgggaaccccggccccatgcaggcgcagcagcgccgcctccatcccgctttgacgcagccacagcagatcgtccatcgtatttttggtgccgggcaggagcacaaaatccggaagccccagcgcccgtatatccgccacataccgcacgcccagcagcgaatgggactccagaggagtaaaatccgtgaagttggacagatgcggcaggcacaccaccaccacatccagcgccttttccgtttgccgggcattcagccggggcgccagggaatcttcgtcatcaatgtccaccggaagatagggcaccactccgagcacctgcttgcccgtaagctgctcaagctgaacaagccccgggcgcagcaacgctgcgtcgccccggaatttattgatgatcaatcccgcaatgcgcgcacgctccacttcttccagcagagccaccgtaccgtagagctgggcaaatacgccaccccggtcgatgtccccagccagcagcaccggtgcatccaccgcccgggccaagcccatattcacaatgtcgtccgccttcaaattaatctctgccgggctgcctgccccctcaatcaccaccagatcatattcttctgccagggaatcataggccgccagcacgtccggcaacagattctttttccaacgaaaataagacgctgcatccatctggccccacacctcgccgtgtacgatcacctggctgcccgtgtcgctgctgggcttaagaaggatcggattcatgcgcacatccggctccacaccggcggcgcgggcctgcaccgcctgcgcccgccccatctcgaggccctcggcagtgacacagctgttcagagccatgttttggctcttaaagggcgctacgcgccagccgtcttgggcaaagatgcggcacagagccgcgcacagcaggcttttgcccacaccggacatggtgccttgcaccataacacactttgcacgccgcctcatgtcctcgtctcctccactacggtttttattgcccccagcaggcactggttttcctccggccgccgtaccgcagcacggtaccattgcgggccaagtccgcggaaatttgcgcagccacgcagcagtatgccctgtttgcgcagcggctccagcaagggcaccggcgcgcggaacagcaggaaattggcttcacccgggatcacttcacaccccagcgccgccagcccttccgccagatggggcctctcagcgcggatcagggcacgcacccgtgccacataatcctgctcccgcagcgccgcaattcccgccgcctgggctggggccgacacgacccagggcggcccattgcagcgcatccgctccaaaaaggcctgatcgccgcaaagggcataccccaaccgcagccccgccatggcgtgaagtttggtgaacgctttcaccactaaaaggccgaactgcgttgctatataccgctttgctgagtgagccgccgcatggtcaagaaaatccagaaagcattcatccaccacagcgaaaatacctgcctgggcacagcgcgccagcgccgcttccagcagcgccgggggcaggactcggccagtggggttgttgggctggcaaaaaaaggccatgtccagctccggcgttagggcatccagcagttcttccccggcggtaaagcccgcttcccggcgcagggcactgtgcactaccacacaacccgccgcgcgcagcgcgctttcgtattcagaaaaggtgggcgcaagcaccagcgtccgccggggccgccgcgcccaaactacacgccagatgagatccgccgccccgcatccgcacagtaccatctcttcctccacctcttcctccgccgcaatggcgcgccgcagggcgcggcacaagggatcaggatagcggtcagcctccctcagtgcctgcgccgctgcgtcacgcaccccctccggcagtcccaaagggctgactgaagcggaaaaatccagcggcagcgcgccgcattccgcggcaaagcccgcccaatctccgccgtggggcagggatattatttgctcttccatgcttcctcctttcagcgcgccaaaacataccatagccccgcccgcagagcgcacagcgccgccagcgccagcagtgcggcagtatagagcatccggttggcgcgcaggatgtcctcgtcttccacgggacgtgccgcatcgccgatggtgtctttggggcacagcgcaccaaaatagtacgccggcccacccagctgcactcccagcgcgccggcgcatgccgcttcggtctgggctgagttggggctggcatggcagcgccggtcccgccgccaaatacgccaggctcccgagccattttgcccggttaaacaggctgcggcaatccacagcaacgccgccagccgggatggcagataattcgctgcatcgtccagcctggctgcggcccggccaaaatcaatatagcgttcgtttttgtagcccaccatgctgtccatagtgttgattgctttatagcacagcgccaacggcgcgccgccgaggagcagatacatcagcggagccaccacaccgtcggcgaaattttccgccactgtttccacggcggcccgggtcactccggcttcgtccagcctttcagtgtcccgccctacgatgcggcccaccgctcggcgcgccgcagccaaatcgccccggcgcagctgttcatacacccgccgactttcctgcgccagaccacgcaccgccagcgcctgccagctccatagcacctgcacggcaaaccccagcgccggatggatgcgccaagtcacaagacacaccgctccgctcagcgccagcgtacccaccggcagcgtagccgccagcactgcgccagcggcgcgctggccgcaccgtgtctgcggaaagcgcggacgcagaaagcgctccagcaccccgatagcccggcccatccacaccaccggatggggaaaagcaggagggtcggccaacagcagatccagtacaaaaccgcataatgctgcggccacaacgctcataaatcaatcaccatttgtaatatttacttcctttaatacttttagtgtcctgttttctgcccatgtgctgccgtcgagtacaaaaccgccgccgagtttgacgcgccagtcaaagtaggcgcgacggggcaggccaaaacactccaacgctgccatgagc

SEQ ID NO: 4461 - DNA, 9201 bp, Unknown
  16S sequences of unknown bacteria
gggccgcccgccgctacgatggcgggtttgaattgatgtaaggaggaaagacatggctaaattacagcccatgcgctataaaagctatgtctggccccacaatccgaggagttacagcatcacctatcaccgccgcctgacggcgcgggaggtgccctacggttattatgtactgcagaatctcggacagggaatgcgtgtgatgaaaggcagcggcgaatttgtgggggaaggcgcttatgaagaatttaaacgcttggctacagtgtattacgacggcggcgagggggtgctggtgcatccatgttggcagtcggcccatgtgtactttgcggcattgtctctggcgcaggcaccgcggccggattatgtggcgtacacctttgaattctgggaaagctgtgatttgtatgaaccggagctgcaggaaacagcagcgggcaccgcggctgcatctgggccgtccgcaggaaacggaggcgggcgcaccgcgggacaggtgtgctatcacactgtgcgcaaaggcgagacgctatggggaattgcgcgcagatacggcatatcgctggaggtgctcctggaatggaatcccggcatcaaaaaccccaattacattacgatgggacagaaggtgcgtgtgacataatggaggcggttgtacagctttatggcggcggaagcgtagtgcttgcgcctcttttggaatgggaaacgactctgacaggcggcgtaccctgcgacagtttttatttgaaatgcccgtatcatgcggcgcaggccgcacttttggaacgggcctggcgtgtgacgctgcaggagaagggggcggttttgctccgggcggtggtggatgaaacggaaatcgtgcaaaacggcgccgggcagacactggagattagtggccgcggcctggctgcgctgttgctggacaacgaggcggaggccgtgacctatacccggcccacactttcagagctgctgcgccgtcatgcggcaccctatggcctgtcctgggggatgttttcggaacttcaagggcaagcggagtacagtgtgtccagtggtgaaagtcagtggagggcgctggaaggatttacccggtgggtcggcgggttcgtgccgcgtatcacggcggaaggactgctgctgcctgcagcgtggaaggacaatggaagacggtttgtgatcggcgccgggacgccgctgctggagctgcgttggcaggaccggcgctatggtgtgtattcggaagtgctggtggtagacaaagtgcgccgccagaggcagcgggtggagcacacggcgtttctggatcggggcggctgttgccggcgggtactgtatgtgccagggcgcagcagcagtgcggcgatgcgctatacggggcaatatcagatcgaacgctcccgggagggggctcggcagctgacggcggtgctgccgggaagacaaggagcagcgccgggaagcgtgatacgcatggagcgcagtgatatcggcattcaaggcgacttctatgtggaagaggcggcgtattgctgcaatgctgcaggagaaacgacaacactgcgtatgaggaggctggaagaataatgtggctatcacaaaagctgcgcgcagcgcgcaccgcggaggaaaccgcggcagatttaggtgtgaccactatcggcggcgaccgggcaggggtgtatacccggggagaggtgcgggatcttcctgtgtgtacaccaggcggcatgctttggcagcccaaaagcggcgaccaagtagtggtgctcaaaggcggccccggcggggaggaagtctttgtgctgggcacacacaaggagcagagggcagcagcactggaggatggagaggtgtatctcttttctgagagagcgtccatttgcctgcgcaacaatggcgccattgaactaaccgggcagctgctgatcaacggagaggcgtatgctccgtgcgattgtgggacgtctggaccgggcgggctgtgaagtacagaggagaataaggctatggagttaaaaatcaggaatggagattatgtggcgctggaaaacggcgggatggaaatggtggagggcagtgcggagttgattcagcgggtactgtaccgcttgacggcccgccgggaagggttcccctttatccctacgctggggagtacgctgcatcagctgggtcgggtaaacgcgcgggagtgcggcagcgcggccgaggcggcggtacgggaagcgctgcatgaggaggaggatctggacgttaccggcgtgacgctggacaatgcggcacagggcctttatacgctacgcgttgcgctgcagtataaaggcgaccctatcgaggtggcgctgaccattcaatgagaggagaatgggattgaaaacggtggaggaaatttatcaggcgctgttggaggatttttcaaagcgcatcgggcgggatgtttctcattcctgcgatctggcggtgcggctgtatgccgtggcggcgcaggtgcaggccctttatgttcagatggactgggtgcagcggcagagttttccgcagacagcccagggagtttatctggactatcatgcgcagacacgggcgctggaacgccgtgttgcagtaaaagctacaggtacgatgcgcttttccgtgcgtaccgcgccgcaggaggatcttgccattccggcaggaaccgtatgtctcaacgctgtgggggtgcgctatgaaacggtgcaggaagcggctctggctgcgggggaaaccttcgcggatgtgccggcgcaggcggtggaagccggcgcggcaggaaatacggcggcggatacggtgttgtttctgtccgcgccaccggcgggtatcgttagctgcagcaatccaacggctttcgccggcggagaggatgcagaagacgatgaaaccctgcgcggccggatcctggacagttatcagcgcctgcccaacggggccaacgccgctttttacgagacggaagctatgctgtatcccggggtggcggcggccagagccgtgggccgggccagagggatcggtacggtggacgtctatgtggccaccacggcaggcgtaccagaagaggcgctgtgtcaggagatccaggcggctttggaacggaaacgagaaatcgctgtcgatgtacaggtgaaagcacccgcggtgcagacggtggatatcgacgttggagtgcatttaagcacaggagagacactggaagcggcagagaaggcggtggagacagtgctgcgggcttattttaccggtgcgcgtctgggttgtgcggtgccgctgtccgaactgtacgctctgctgaacggcttgaatggtattgccggctatcgcattctgtcgccggtggacgatgtggcggtgtcggtgtctgtactgccggtgctggggaaactctctgtgcaagcattggactaaaaaggagggagcgcattggggtatgcagaatacatccggggattgctgcgtccggtcggtatttatacgtttgcgccggggagcatcgggaacggtgaaatcgagagtatcggcgcggtgctggacggctgtgaagcggcagcggaggaaagcgagcgggaagtgctggtgcccacggcgaaggactggggccttgcgctccgcgaggtactgtttgcaaagaagccggcggcgccgaccctggagctgcggcgtgcggcaattcttgccttgctgcagatcagcggcgatggctttacgatagagtctatcaatcgtgcgctgagcggctgcggaatccgggcggtggtagcggagaccgggcagagcgggcgcgtgcgggtgacttttcccaacacggcgggaattccggaagagtttgaccagattgcgggcatcattacggatatcattccctgccatctggaaacggaattttatttccgctatctgacttgggtggaattggaagcacgttttaccagctgggagagcatcgagcagggcggatatacctgggaacagctggagcttgccgtataaagacagggaaaaaaccgctccgacggatgtccgtcggagcggtttttaacttgcgggagagacgcgcttaaaaatcgtcatcatcgtcatcatcggcataacgatctggttccttgtgcatatggtaggagacaatcagcaggaaaatacctgccaaaatcgcggtgacaaccaattcgttgttgcctgtgccgcgcagaaccagcgctgcgccgatgaacagaataccaaaggtaagacagatgagggacttgggatttttcatagatggcctcgattccgataaagtttcaattttcctttctattatagcgtttttgcggaaaaagtcaagaaaatgcggaaacggtcacagtgcggcgcgatagatggcgcgtacatcatccggcgtcagcttgcagggatggttctgaagcatcatggcagaaacctggaaacagttttccgtcatccagtcaatgtcctcctcctgcacgccctgctcggacagagtgcagttcagatcgatgcgttcaagaaaacggcgtatagcgtccgggcagtcggcggctttttttccgcccagcagtttggcaatagttcggaacttttcgggcgcggcggacagggtgtgctcataaactatgggcgtcagcgcggccagaccgcagccgtggacaatgtcgcgcaggccgctggcggggtgctcgatgccatggggcgctacgacggagctggtataaatgctcatgccgccgaatgtgctggccagagtgacggcttcccaggcttcatcgtcgtcagggttttcatatacccggggaaggaatttgacgctcagttccataccgcgtaaggccatgatttcggaaaaaggctgccctttgcgggagagaaatgcctccatattgtggcatagcgcgtcaaagcccacagcggccaaaacaggttttggcatggttttcatcagcagcgggtccacgatagacaccgttggaagatagtcgttgttgcgcataccccgtttgtcgttcgtggtgggatccgacagcacggcggtgccgttgacctcgctgccggtaccgcaggtggtaggaacggcaatcagcggcagaatgggctgaggggtgcggcgcagcagctgataatcaaggatatctccttcgcaccggcacattagggcgatggctttggcggcatccataatgctgccgccgcccagcgctacgaccagatcgcattttgctttccggccaaaggctgcgccttccattacggtagtggtcagcggattctgggtaactttatcaaatacgacgctttccacgccggcgtctttcagcagtgcggcggcgcggtccagaaggccgctcttttttgtactgctgcggccggtgaccaacagggcgcgtttgcccagtttggcggcttccgagcccagctgttcgatgcatccgcggccaaaaacaatgtggacagggagattatattcaaattccatgaactgcattcctttctcttttctgattgggatcttaataacccagcgtttcgccgatcaggactacctcggtttccccgatccccttgacaggctcccacagcactaccaggccacggcagatgcgatcagggctggaacaatcgtagcatttgtcgccgcgcagggcgcagggggtctttttttgcaaacgctgggcgtttttggggctggcgatattgcgggcgcgccacagggcggcgtcataatcggccgcaattttattgacgccggtgaccaggtagagctttttgtggccgtacagtgtggcagcgacccgattgcctgtgccgtcaatgttgaggatctcgccggtttcggcaattgcgttgacggaagaaaggtatacatcagcccgttccgccttgcggtaggtttcttcctgggacgtaccctcgggggcataccactgccagaacacttcgttatgggcggcgagtttttcgtaaacgcccatatcccgcaaagtgacggagccgcctacgcctacgctttggctatcgatcgaccggtcaaggtaatctgccgcttgggcggcagtgtcaaaataggatacggtgaaaccgcgttttttcaggttctccatggtttttgctacattcataacaaaatctcccttcttttcgtttcacccgttctgttttacgggaataaacgctctttttcgtatacacatcccttttagtgtatatacactatatgatgcagagattcatttgtcaatagcgaaaaaaagagacgcatctgcaaagcagatacgtctctcttggtgacccgtcggagattcgaactccggacccattgcttaaaaggcaattgctctgccaactgagctaacgggtcacatcatgtgcgcgcaggacgcgcatttataaaaaatacagctgaaagatcgctgcatccggtatgctggctgggatggctggactcgaaccagcgagtgagggagtcaaagtcccttgccttaccacttggctacaccccaatacaaggggaaaattcgtggggccggacagcacgtccgacccgctgaactttctctggggtgggtgaagggattcgaaccctcggcctccagagccacaatctggcgcgctaaccaactgcgccacacccaccatagcggattccgttgggtggaaccaatgctgctgacctcctgcccgcctgaagcagattcatcggaaaaagatggtacgcctggagggattcgaacccgcgacctaccgcttagaaggcggttgctctatccaactgagctacaggcgcatatggagcaggtgatgggaatcgaacccacgtccccagcttggaaggctggtgccctagccgttgtgctacacctgcagatatggcaggaaaatgtcagccttgaaatgatagcataaccaaagggctgtgtcaagagaaaacggaaaaaaacgggaaaatcttttgaaaaatgctgtggattttgcatttggactgtctgaagcgaccgttcaggctgtcgttggagcgaacagcccggcagcgaaggcggcaaagcagcagagcgccgcgccctgtaagatcagaaggagagggatgccgaaacggaaataccatttgcgcgttttgtgatggaaaatgcgcatgcccagcagcgcgccggcactgccgcccagaagagagagcagaaagagtgttttttccgggatgcgccaggactcgcgccgggcacgccgcttatctgcgccgaaagccgaaaaagtggcgatgttgatggccagcagatacagtgccggcagattgtacaggacttccatgaggctgcgttctcctttgaagggtatgcgttttttccatcatacgaggaacgaaacgcaaaagcaaggagttttttcgcacggtgccttgtcaaatccacgaaagctggctataatgtttctatattttgacgaaccgaatgccgaaaagaagggatttgacaatatgaagagaaccgaaattgccgctgtgtatgccgacggcgaggccttgagcggccaggaaatcaccgtctgcggctgggcccgcaccatccgcgacatgaaaacctttggcttcatcgaactcaacgacggcagctgctttaaaaatctgcaggtggtatttgaggatggaacggtggacaattaccgggaaatcgccaagctgaatgtgggatcttctctgatcgtgcgcggcacggtgaagctgacgcctgaggccaagcagcctttggaactgacggcactgaatattgcggtggaaggcccctccacgccggagtatcccttgcagaaaaagcgccacacggtggaatatctgcgcaccatcgcccatctgcgcccccgcacaaacctgttttcggcggtgttccgcgtgcgctccgtggcggcgatggcggtgcatgaatttttccaggagcgtggctttgtgtatgtgcatacgcccctgatcactgccagcgactgcgagggcgcgggtgaaatgtttcgcgtgactacgctggacgccaaaaatccgccgctgactgaagacggtgcggtggacttcagccaggactttttcggcaaagccgcgaacctgacagtatccggccagcttaatgccgagtcctttgccatggcttttggcaatgtgtatacgttcggccccaccttccgcgccgaaaattccaacacccagcgccatgccgctgagttctggatgatcgaaccggagatggcgtttgccgatctgaacgattatatggacaccgccgaagcgatgatcaaatttatcatccgccgcacgatggagcgctgcccggatgaactgaaatttttcaacagttttgtggataaaggtttgctggagcggctcaaccacgtgatgacgtcggagttcgcccgcgtcagctataccgaagcggtaaaactcctctccgaaagcggccaggacttcaagttcccggtttactggggctgtgatctggccacggagcacgaacgctacctgaccgagcagctgttccgcaaacctgtgttcgttaccaactatcccaaggaaatcaaggcgttttacatgcgcctcaacgacgacggcaagacggtggcggcggcggactgcctggtacccggcatcggcgagattatcggcggcagccagcgtgaggaacgcctggaactgctggaacgccgcatggacgagctgggcatgaaccgggacgactattggtggtatcttgatctgcgccgctacggtggtacgaagcacgctggctacggcctgggctttgaacgcatgattatgtatctcaccggtgtgagcaacatccgcgacgtgcttccgcacccccgcacggtgggcaacgcggatttttaagcgcgggtcatggcgaaagagaaaagaagcctgactttggggatgcggcggatcttattgccggcagcagcggtggtggttctgctgctgcttgcgtttgccgccggcatgctttggggcggacagggacgcagggcgaaaatcacggcagatcttctggaccagcagctccgggaggtcagcgacttggtgacagtggaataccgctataccaatatgggaaaatttgaaaacactctggatttttacggctgggaagtcccctttacaaccaaaagttttattgtttcatatgacggtgtcattcgtgccggtgt

SEQ ID NO: 4462 - DNA, 8051 bp, Unknown
  16S sequences of unknown bacteria
tcgaggacagcccctgagggcagtctgcccacggaacgtggtcagactgttccggcctaagggccggaattggatgccccgaataaattcggggcatccaaccgttcggctcccgcaggacgaagcccgccaccaagggaggccgaaggccgactagcgccagaaatggccgaaggccatgaagcgcgtagccaagcacaagcgtagcgcagggcttggccgcagtgcgaagcgacgtgggccgcctctggagtcgccgtgccgcgtgctttctttggtactttctttcgtttcgaaagaaagtacttccccccctcggggcggcagccccaccaaccgcgccggagtcggcgcatcaatccccacccgggacaaggggactgcgcccacgggcgcaccaaagggctttccgctcgccctttggaaaccttcgggcatcgaagttggcgagaaacccataggcggcagccccacctttcgcgccgtagtcggcgcgtcaggcccgctggcgagattttttacagccaagctgatacggcggtgcttgacagcccccttttgttgccgactacagtgattaaacgctctgcaccccctatcacaaataacgtcgaaaggagcccttcccgcaatgaaacataccaacctgaccatgggcatcctcttcggcttcttcctgctctgcgccctgtccatgggcaaccgggtctatttcgtgctggcgaccatcattttcttgagctgggtgttcgccttcgtcagcgtgcggatggccgagaaaaccgtgcaggtgtccaatgccctcagcggtcagaaggtcaaccgcggcgaagtggtcagtatggagatcgccgtcagccataagggcgtgctgcccatcgctcccatcgctttgcatatgcgcgccaccagcaatacccccgcaggcgtgatctacctgacccatttgggcaagcgccgccagcgggtgacccaccgcttcgtggccgaccacgtgggcgctatgttccccggcgtggaaagctatgtggtcagcgatattttcggctttttcaaaaaagaacatcagcccgatctggcgggtcaggagctgctggtgctgcccgtgcccttcgaggtggagccgctgaccttcgccgccggggatatgggcgtggaaaccatgaagcgggccatggaggatccctccagccccagcgatttccgcaattatcagcagggcgacccgctgaaacgcatccactggaagatgagcgcccggaagcgggagctgatcgtccggcagtttgaggaaccggccctgcccgacgcactggtgatgctggatacctccccgcctcatctgaacgagggcgtaccgaaggaaaatgccgcctttttgcaggacgcgctgctggaaacggctgcgtccgtggtggcctgccagatccggcaggataatcaggtacggctgccgctggtgggggaccggcccatggagtattccagcaacatgggcctgcccgtgctgctggaggagctggcccgctgcaccttcaacgagacggaacgctttgagcgggtgctgatgatgcagatggccgagctgcgcaagctgggcgcggtggtcgtcatcaccactcgcctgacctccgaggtggccgacctgctgatccgcatgaagcgcatgggccccaatgtacgcctgtattatgtcaccttccgcaccgaccggcccgagcggctggcgctggtgggacggctgcagcaggcgggcgtggaggtcaactacgtcacgcctcaggggagttgaaaaacgcgatgaagaaacccgcatttttatcaaacgaacgcctgagccgcctgatgaccgccctcctgctggcgctgggcctgttgtggcccatgctgtgggcgctgggcgtggaaagcgcgttcgtgacggccacgctggcgacggcggccctgaccgcgctgatgacctttcaggctgcgggcaaaaaagcccgggtgatctgcttttccctgctgggagcgctgctgatcggccagtttttcctgccgggcggcggctttttcccttcttcggtggaggctgtcaaggccatttcgctgtactttaacggcgtgaccactgcgccgctgctgttctcctcccagatcgcgctgctgctggccgtggccgcggccgtgatcggctacgccttctccgcccggggcgtggggtacatccccgccaccgccatggtggtgatggtgcttttcggcctgtggagcatgggcaagcagggcttcctctggtacgccgcccccgcgctggtggcgctgctgctcctgatcgcccagagttcccatgaaaaaagcaatctgtttcaggtgctgcccatggcagcgatgctggtggcgctggggctgctgatcgcacccggccagaacgtggtgctggggccgctgcatgaggtggccatgaatctgaagcagaccattaccgactacctgttctttaccgagccccgcaacgtgttcacgctgggcagctacggctattatcccatgggcagcggcaagctgggcggcgaggccgagccgaccgagtacccggtcatgacggtaaagacctcccagaagaccctgctgcgggctgtgaccaaggacgaatacactggccgcagctggcgggacacctcctccggacggcggtatctgtacgtcaacccccgttggagaagcctgcggcaggaagtctttctggaaaatatgcccgcagagacggtgctgaaggccagcaacctgctggatcagaaggccatctccattcagatgcagaatagcgcggcctccacggttttcacccccgcctatctgcgctccctgaccacctacggcagcatggtgccctatttcaacgaggccagtgagctgttcatcacccgggacctgatctcgggcgaccgttacaccgtctatgccccggtgatcgagggcggcgacgcttcgctgggcgcgctcgtcaacgccgcgcccaagaacgacccctattacgcccagatcgccgccaagtataccgcgctgcccggccatctggaagaacgggtctatcaggatatgcgcagcatgatcgccgacgcggccacgccttatgagcaggcctgcgccattctgcggcatctgcagcggtattaccgctacaccctgagcccggtcacgccgccggaaaatcaggacttcgtcacctatttcctctatgtgggcaaggagggctactgcacctattttgcctccgccatgacggtgctttgccggatggcgggcctgcccgcccgatatgtggagggctttctggcccagcccgattccagcggctttgcctatgtgacgggccagaacgcccacgcgtggacggaggtctatttcgagggcttcggctgggtgcccttcgatcctacccccgcccagcagaacgtggatcagcagcccccgcagaacgacccggagccggaacccacgccgactcccagcccggaaccgccgcaggatgagccggatcagcccacgcccagcccggaaaacccggagcagagcaacgaaccggacgataccgataccccggacgacgagcccgaccagaaagacccgccctctccgtggctgtggctgctgctcctgttgctggcggccgtggccgcggtctgcgtcaggattttcctgcggatgccggatcggatggccaaaaagcagcagaacgtatcggatcagatcttcctgtatggcagcgccgcctataccctgatgaagctgacgggccgcacgccccggaagggagaaacgcctctgcgctttgcccgccgcatggataagcagcgcgcctttgccgtgccggtcacgcccctgtggcgcatgatggccctgagcaactacagccgtctggaacccacggaaaaactggccggtcaggcgcgggatatcttcaacgccctgtacaagcctcaaagtctgtgggtgaagctgcgctttatgctggccgctggctttgggaaaaactgctaccgcggtctggatacggagctggtgcatcaggagccggaaagccccttcggccagtacaaggacagtctgaagcaggctgcacaggcccctaagaaaaacaagcagaaataaaaggcggcccgccgggtgcccctcggcgggccgcagactgttggaaaagcctgatcggccactatcgcccgtgaacagcgcttcgctggttcacgggaaaaaactggggtacaaagtttcgtggctccgccgccagcaccggcacggggcagcgcatcctgcaccgccgatttttggacaaaaaaagacccgccggaagtgatcctcccggcgggccatttttttaccattcagcggcaaaatttttcgatgtactgatccagacacttctggatgaccttcttcgcatcctccgcgccccgcacctcgtccaccatggtctccttttgctccagatttttgtagacggtgaagaagtgggacatttccgtgaagatgtgggagggcagctcgctgacatcgtggtagctgttgtaggtgggatccttgaaggggatggcgatgatcttttcatccagcttgccctgatccagcatggtaatgacgccgatgggatagcagcgcaccagactcaggggctggatcacctcgctgcaaagcaccagcacgtccagcgggtcgttgtcgtccgcataggtgcggggaatcaggccgtagttggcgggatagtgggtggaggtgtacaggatgcggtccagaatcagggaacccgtttccttgtccagctcgtattttttcttgctgcccttttcgatctcgatgacggcgataaagtcctccgccgtgatgcgggaaggggaaatgtcatgccagatattgctcataatcgttgctcctttcatgatggaaagcggacggaacgctatgccagtgcgatccagtaccgctttgtgcgaacgccgtcgtgctcgtatgtactgtcgaacacgccgccgtttttcacaatgactttttcactggcggggttgtcctcgctgcaggtgaccaacacccggctcagccccagctgccgggcgtgggggagaagctgccggagcatttccccggcgtagcccttgccccgctcactgggacgcacggaatagccgatgtgtccgccccaagtggagagcaccgggtggtcgatggaatggcgcaggtcgatcatgcccacgacccggcggtccttcagccgcagggccagataggtgtcggagggcaccagcccctcggggcaggtctcgggtcgggtcaggcggcgaacccgatccagccaacgggctgcgtcctcaaaattttccagcccggagcagccgtccatgctgctgcccgcgtccagcatttcctgccggtaggcgcgaatctgagatagaaacaccaccgagggccgcaccagctgcagggaatccgggccttcgcccagattgctgagcttttccaccaggcgagcgccccgttgggctgtccggggcagcaccgctttgatgacctcggaagcgccggcggagaacaaggcctgcagcgtcagccggacgctgcgccgggtgtccgggtcgatctccttcagcgcttccagcattttcagcgcccgatcccgccagtcgtcggtaaaatccgttaccaactcgatgcgcgccgcctccagcacggtatagagcacctccacgaaggtctttcgggcttcgctgtccagcccggccatccagctgtgaagggcttcgtcggtgatgcggcccgtcatgtccagcccttccagacagacgaaatgcccgccccgcacctgccacgtcatggcgtcgtgctgcaggatgcccacggcgtccgactccaccacggtgtagacgggatggtagtacatcagcatccccacgacactgctttggggaatatagctgtggatgcggcccttgacggcctgatagccctcggcgtagagctggggctgatacatgcctggcccatcgaagctgtaggcggcccggagccgctgttgcgcctgctcccccgcaaaagacgcggcgtagaccgacagattgccgcccttgctgtggccggtcagctccagcggcccctccgtccgggcggcaatatccgccacatatcgggcggcttcctcctgcgcgggcaccaccatgaaggacatgttcatatcctccacccagcctgcgatattcaggtcggtgccccggaagctgacgcagaccgcgccgtcgtccagatcgtagcaggcggcgcagaactggatattttgttcgcggtcgatgtggttcacatagtcgtgcacctgccagtcctgatagcggggcagaccggcgcagacctccgtcagtcggtagcgcttctgctgaaagcggtccagcttttccggctccacatagtcccgcagaaaggcccagcattcccggacggtatggctttccccgcgatccagaaagccctcgaagggcatgtagaccagctgggtcaggatcagactgtccagcgcgtcgaaggcccgctccgccagccgctgcccgccgatctgaagcgcgtggtcctgaatgttcggcataccgttcctcccgtccgcgccgccggtcaaagagggggcgcatcggcattttagcacggctgggcggggattggcaaggggatgaacttaaaccgggtagcgccggtactggccgggcgtaaagccggtgtagcggcggaacagcttgcagaaatgggcttcgtcgcagaaacccagatgaaaggcaatatccgccacactgagggtgtcgtcggtcagcagctggcgggccttatccagccgcagctgaagccagtactgcttgggcgaaagctccacgcaggcccggaaggcccggtagaaggcggcttcgctcatgccgcacagctccgccagccgggggatgctcaggccgcccgcaaggttgcggcagatgtgctccaacgcgggctgcagggccatgagccgctgcccggcaaacccgggactctggcgcagcaggtagatcagttcgtacagcttggcctgcaaaagcagctgggagccgtgaacgtcccagtacaggctggcgagctggcggaggagcagctcgcattgcccggccagcgcagccgggggcacgatgggggaaaattcgcccagccgtgcgggctgcccggcttcatccagcgccagaaacttgacgcacaggttggtaacgattctgggaccgtggggcaggttgacgtttgggtggacgggattgtccacctgcagggcgaagcggctgccccggggcgtatagaaaatgtcgccctgccggggatggaacaccgcgccgctatccagccgcagggtaaagcggcagccgctttcctcaggcagaaagaacagcagcgcgtcctccgaccgagaagtctccaggtagctgtaatgcccccggtcggcccagaactggggcacggcgcttacaagatgcaggcgcagagcgtcaaaatcttccgaaagcggcatgatcttcttcctcccgactgatcgaaaaatacaaaagaaaagagaaacataccttgcgcggccaattcgggaaccgtacaattatttccgtaaaagtatagcatgaacgttgcaaaatcgaaagaatctgccgaaaaatttcaagcaggggaggaaaaccggcggcggaacgccgggaacaggaacgatggaaaaatactttggcgtttgctattacccggaactgtaccccaaagagaaacaggaagcctttatccgggaggacatcgagaatatgcgccgggcccggttcaacgtggtgcgcatggcggaattctgctggtgcctgatggaaccccgagagggcgtgtacgattttgactggctggaggagatcgtcgaccggctggggcaaaacggcatttacaccgtgttgtgcacccccaccgcctgtcagcccgtctggatggcccgccggtatcctgaaacactgtatgtggacaatctgggcgtgcagcgcagctacggcggg

SEQ ID NO: 4463 - DNA, 32759 bp, Unknown
  16S sequences of unknown bacteria
aaatgaacgcaaagccgcaatctaaaaggcggcgagcgaaaccgcggcaggttcgggtcttgtcacactatgttgctggtatttgcatatatgaatgggatttattcaagtagggagatagaaaaagcctgccgaaacgacatccgttttatgtggatataacagaattcaccggtacccgaccacgcaacaatcgcacattttcaaaatgaaagactgtcggcggttatggaaaatctgttttaccaattagtattaaagctatctgagcttggcgaagcagaatttaaaaatgtatttgtggacggtacgaagatagaggcaaatgccaaccgatccaaataaggagaattatatgaaaaagattattaaaacctttaatccaaaattgcaccccgaatatgattatgtagatattaaattatatttagataaattaaaagaataaaaaatatattaaaaagaatactttttctatactatatcatcaaatgtttaatttaattaaaacatttgtttcacaaagcaagagttataaatatattaaccttacatacggtcatataatacttttatcatatttaatgggatatataaaagatgtttcagcaagtgaatctttttggggcagtaataatacacttgcaagtgatataggagtatcttccagaacaatacaacgatggttgaaagatttagaagatacaggatttattgcacaatgcttaataattgcggaataggtgaatatttcaagaaaaggttaatgaggcatacattaaacgactcaataacagacagcgtatacacccattcaacagaatccgatttaattaaagccgcaaccccctttataaattacatagacaacatattcaaagaatgtaccaatgattttttatatattattcttttatggggggatttaggggggaaataatgattttaagacaaaaataaaacagcgggtcttcaaaaacccactgtttactatggctggggaatagggattcgaaccccaacaaacagagtcagagtctgtcgtgctaccgttacacaattccccaaaatcgacaacacgattattatatcacctttttcaaaaaagtcaagctttttgtaaaatatttttatttgtattaattctgcgtattcatttacaatataattattataaaactccaactatttcaataaaaatgacacaaaaaattccgtttccccttgttatcacaaaaaaatttgttataatatacttatagcaattataaggagtgtgccatatggttaatgaaaaatatcagctgtggtgtgaaaaagctgtcgccgaccccgaccttgtaaaagaacttgaatccatgaaggacgacggggcggcaatatccgacgcattttataaagatcttgaattcggcacaggcgggcttcgcggcgttattggcgcgggcacaaaccgaatgaacatatataccgtcggcaaggcgtcgcaaggtcttgcggcttatgttaattccgtaaaacagaacggtaaaatcgccgttgcttatgacagccgcattaaaagcgagcttttcgcgcgcacggcggcttctgtttttgcggcgaacggcataaaggtttatatatataaggagcttatgcctacgcctatgctttcatacgccgtgcgcaggctcggctgcgacgcgggcatggttgtaaccgccagccataaccccgccaagtacaacggctacaaggcatacggtcccgacggctgccagttagggcttgaagccgccgattatgtgctttccataatgaataaggttgatatttttgacgaggtcaagactgtcgattttgataccgccgttaaaaacggaagtattgagtttataggcgatgatgttattgaggattatcttaattgcgttcttgcctgccgcgtagcgcccgaggcggacgttaaatcgcttaaagtaatttatactcctctgcacggcagcggtaataagcccgtaagaagtattctccgcaaaatcggcgttaaaaacgtaacggtagttcccgagcaggaactgccgaacggcaactttcccaccgccccctaccccaaccccgaaattcgccaggcgtttgagtgtgccttaaagcttgccgaaactcttaagcccgatttactgcttgcaaccgaccccgattgcgaccgcgttggcattgccgtaaacacaggggacgattacaagctgctttcgggcaacgacgtgggcgcactgctgcttgatttcgttctttcccgccgcaaggcaaacggcactttgcccaaaaaaccgattgccgttaaaaccattgttacaaccgagctttgcagaaaaatcgccgctgactacggctgcgagctgcgcgatgttctgaccggctttaagtttataggcgagcagattactcagcttgaagaaaagtgcgaagaaaaccgttttgtattcggctttgaagaaagctacggctatttgggcggcacctatgtgcgcgataaggacgcggttatcgcctcaatgcttatttgcgaaatggtggctttttataaggcaaagggtcttttgcttaccgatgttttagaggagctttataagaaatacggctactacttctgctcgcaaaaaagctttacctgcgagggcgaaagcggtatgaagcgcattgccggaataatggataccctgcgcagcgaaacccccgccgaaattgcaggcgaaagggttgtaagagcagacgattatgaaaaatcggtaagccgcaaccttgaaaacggaacagagagcaaaattacactgcctgtttccaacgttctttgctattatatggctgacggcagctcacttatagtccgtccttccggtacagagcctaaaatcaagctttatatcggctcggtaggcgtaactgaggaagacgcaattgcaaagcgcaccgcgcttgaagaaagcggcacaaagctgctcggattttaaaataacgatatgcatataagtaaaaaagcggagcataaattactatgccctgctttttacttattttagagaattatttccgtcaccgcatgctcacccttatgtattccgaaatcggcagtaaaatcctttccggctatactgtaattgccgtaaaatccgcggaactcggcataaccgttttcatcggttgtaagctctgtttcggtgtgccatacctcgtttatcagcttttcaagccttatacccgcctttttcggggttaaatcgtggtgccacagcccgccgcggcactggttttcgttccagctgcctgtgccgtcgtcataggcatagccgtcgggaatattccagtaaattatatcctgcattgccgggtgactgaaccatacagagtaaagcagctcaagcagatccgcctgtaattcctcgtcctcagcggtatcgccgaaggtcggcaccgtaacctcggtcatttcaagcggcagtcccagctcggctattatgtcaagtcccttaagatttataagcgggtcaatcaatttttcgccccgcttaacgctgttttcgtaagcctcaccggttttatcggttgcgccggtgaaaatatggtgctgcaagcctattttatcgatttccgcgccgcttttaagcgcgttttcaatcatcataaagtaagcgctgcggtattttgctgcactcaaattaaccagcgggttaccctcgtttataaccagtgtttcattcgggaaatattttcttgcaagcgcaaatgaccattctattatatcgcgcttgctgctgataacgcttttgtagccccaccactgctcgcaaagcaattcgttaattacctcaaattcaagcagtcttcccgtaaagcgctcggatatttgcctgaaacgctcctcataaagcttttccatagccttcatatcatcgcgcggcagccattcaggtataaatttatcatacacaagacaatgcagcttaggcattataccgttttcctcgcagtattccacgcaaagctcgggggcgggtctgcgccacaccttatcgctgtttttatcatagcgcggtttgcccttttcgggctctaaaccgtcccaataaaacggaacggttgcaaggttaaagcattttttaaaattcgcgcggtatctttggttatattcttcgttatcaaattcttcaagcataaaaatatttgcgccgaaaccgaaatcgtgtgaaagctggttgaccttaatttttgcgtttttaatcggtctgccctcagtgtcggtaaggcgcagcttgcagtagcccttacggtatttttcaatatcgttttttactctgccttcaagcaattcgcggctgtcctccgctgctttcatccaaatttttctgttttccgccgggttaagcataaaaatttcctcctatattcaaaaaagaaatagttttcttttgcatattatatataacttttaaggcgctttcatcaacaatattacactgtttgcaaacaatattacggttacttgattttttttactccttgtggtaaaattatcccacataacttgaaaaggcagagatactatgaaaaacaattcaaagggactgtttaaaagatttttaccgtatttactggcgtataagggcacaatagcgctcgaccttttttgcgcttccctcacctgcgtttgcgaccttgttttgccgcttattttgcggacgataaccaacacagcggtaaacgatatttcggcgctgacagtaagccttgttcttaaaatgagcgggctttactttattttaaggcttattgacgccgccgcgcagtattatatggcggatatgggtcacgttatgggtgtatacatagaaaccgctatgcggcgtgatgcgtttgcccacctgcaaaaactggggcacaattactactcaaacaccaaaatcgggcagataatgggcagaattacaaacgacctttttgaagttaccgagttttcacaccactgccccgaggaatttttcatagcctttcttaaaattgcggtaagctttaccgtgctttgcacatataatattccgctaacgcttataattttcctctgcgttccgttaatggtagtcgtatcggtttaccttaacagaaaaatgcgcgccgcctttaaaaatcagcgtgtgcaaataggcgaacttaacgcgcaaattgaggacagtctgcttggcgagcgcgtagttaaggcattttctgccgaaaaagccgagcaggaaaagtttaatgcgggcaatgaaaaattcaaaagcattaaaaaagccacatataaaattatggcgcagttttccgcctctacccacctgtttgacgggcttatgtatatcgtggtaattttaggcggcgggcttttcgtaatttacggcggaataacccccggcgacctggtagcctatgtgctttatgtttccacccttattgccacaattcgccgcatagtagagtttgccgagcagttccagcgcggtatgacgggcattgagcgcttttttgaaattatggacgcgcccatagaaataaccgaaaagccgaacgccgcggcgcttgaatgtaaaaagggcgaaattgaatttcgcgacgtaagctttaattacgaagcagacagtgaaaaggtgctaaagcatttgaaccttaaaatcgcggcgggtgaacgactggcgcttgtcggcgcctcgggcggcggcaaaaccaccctttgcagccttgtgccccgttttatggatgttaccggcggcgcggttttaattgacggtcaggatgtgcgcgacgtgacccttgcaagtcttcgcggagctattggtattgttcagcaggatgtttaccttttcagcggtacggtaaaggaaaatattgcctacggcaaggaaaacgcgaccgacgaggaaataaaaaacgccgcactgcttgcgggggctgatgaatttatttcccgcctgcccgatggctataatacatatgtaggcgagcgcggcgttaagctttcgggcgggcaaaagcagcgcatttcaatagcgcgcgtgttccttaaaaatccgcccgttcttatacttgacgaggctacaagcgcactggataacgaaagcgaaattttggtgagcgaaagccttgaaaagctggcacacaaccgcaccacgcttacaattgcccaccgccttaccaccgtaaaggattacgaccgcattgtggtgctgggagccgagggcattgaagaaacaggcactcacgaagaactgcttgaaagaaaaggcacttattataagctatggaataaaataaggtgacagcggcatttatttattacgccatataataagcatcgttccgtttttaacgctcattttagcagttgtgccggtaaattcattgcttaccccaagcggaaagctgtattcaagcactgcgttttctagcggatataatactccctctaaagtaacgccctctgccgttccgctcatagcaaaaaccgataccgtgccctcgcgctctgaaaattcaatttcggaatttgtaatgcagcaggcagtatagccgttaaagcagaggtatcccctgccgccgcggcgggatatatagcacaatgtctgataattggcaaatgtatggtcgggtctgccccctacaccgccgtatataacaaattcattatatccgcgctcaaagcctgttttaaccgcaagaatagtgtcggtatcatttttcataaccgggtgcttaataacctctgcgcaatcgggcacaaagcccagcgaatcaaaatcacccacggcaatatccggctgaacaccgaatttttccaaatgatttattcccgagtccgccgctataattaaatctccgtcattttttaccaattcatcgggcagaccgtccgccgcgccgaaaatgtaacaaattcccattaaaaaatctctcccgaaattaaagtttgtgttgaaaaatgtcgccgcaagagtataatagtatagtaactatattttaacagatattttataaaaaacaatacttttttaaggcgaggaacaaaatgaacgcaactttgcgaaaagcacttataatttcaggcgcggctttgggcgcggtaattgccgctacggtcgctgtggttattattctgaaaaccggctcgcgtgcggcaaacgcacggcttgataacccgcccgcttcatcggcacttgcaagctcagagccgcaggcacctgtagataacggcatacgccttgttatatcctcccctgaaaatgatactttaaacgtaacagccccggaatttacgttttccggcacctctgacccggcagagccgcttacggtaaacggcacggcagttgagcgcggcgaggacggcgcgtttacatataacgttacgcttaatgtcggcaaaaacacctttgcgtttgagcacaagggcgaaacaaaaacctacaccgtaaattacaggtacgttataatagaaagctattcgcctgcaaaggcgcaaacatatcccagcggttcaacgcttgttgtaaacgttatggcgcacaagggcagcgcggtaacagccacatttaacggatcaactcaaaatcttaccgttgcaaacaacagcaatgatgaaaaatccgattttatatcgtataacggcgttttcaagctgccgggaaacaacacacaaaacctcaacctcggcaaaattgtatttaaagccacgcacgccggcaaaagcgaaagcttttcatcgggcattataacctgtaaaaagagcgatattatagtcgattatgaccccaaagccacacctaccggcggtaaatatatgaatgtaggctcgggctgtattgccgaaattgtgggcgaaaccgccgagacctttgacggcaacgtttccgccgcagccctcaaaaacggctcggttgactggtcaagacctaccaataactatctcccgcgcggaacggttgattattcgtcgcccgaccttgttatatatgaaaccaagtccaacaaaaatgagtatataaccctgcgcgcaggctaccgcgtttataaggaactgcgggataaaccgcgcaacgggcgcaagcaaattaccaagcaatataccggcaccctgcccgaccacaacgagataaagcttgcctcatttgaaaacggcgatacgcacaccgttttaacctttgatacaaactggaaagcccccttctactttgacattttgccgcaaaattacgctaaccccgcaactcagaattacaatgtttcggcggtaacatttcaatatattgatataacattttgttatgccactgtgtttgagggcgaaatttcaatacccgaagataacccgatttttaagagcgcggagcttttcaagaatatgaacgccgataaaagcgccgtgcgtgattataccctgcggctttatcttaaaaagcagggcgcgttttacggctgggactgcgcgtataacgacgcgggacagcttgtatttacatttttaaacccgaaaaaggttaccgcagcggataacgaataccgcacaaatttaaacggcgctaaaattcttatcgacgtgggtcacggcggaacagacggcggtgccgcagggctcggtaatcttaaaaacagctattgcgaaaaggtagcaaatctaaagcttgctaaaaaaatagaggcggagcttaaaaaggcaggagcaaaggttgtaatgacaagaacgggagataccgtaagctccacccttgataaaattgcaatattaaaacgtgaaaagcccgattactgcatagccgtgcatcataattcatctacaagcggcagcacaaggggctttggggcatattattcaaacgctttttcaaagcgcccgtcggagctggttctcgcgcagacgaaaaactctacatcactgtatacggatttcatttttaaatggcattactactttatgtgccgcataaccacctgccccgtggtgcttaccgaaaacggatttatgtctaactcggctgatttcggcataataacaaacgatgcaaagaacaccgaaaaggcaaaagccataacccgcggaatagttgattacttcaattcaatacaatccgaataaagtcaagccccgataagatttgctcttaccggggcttattatctattcaaataatataaaacactctcaaattaaattcaactgctcatttttcgcctgtaaaacgccagtgccccaagcagcaagccgccggctatcatattccgtgccggaaaacgctcgctcagggtgccgtttatgagcctgcctatcgcataaacaacaaaaaacacactgccaagcatagagtccatattatcacccaatcagaacaaggttctatatttttatcatttattagaacaatagaattatagcattttattaaagacttgccaataaaaattctgattttcggcttgacaaatacccccaaggggtatataataacacacagaaaggaagatatcctatgaagcaggaagaatatataataagcggaatgtcctgcgcggcgtgctctgcatcggttcagcgcgtagtgtcgcggctggagggcgttgaaagctgtgatgtaaaccttataacaggcaaaatgaccgtaagctatgatgagcaaaagaccggtcagtcagattttacccgcgtggttgaaaaggcggggttcagaatacgccccgatacccctgaagaaacagaaaaaccgaaaacagacgaaaagaaaaagggcggcttcggcggtactgtggtttcggcggtattatcggcgttattgctctacatttcaatggggcaaatgctgacggacaagctgcccgttcccccgtttatgaatatttctggcgacccctacggctttgcgcttacccagctgctgctttgcatacctgtaatgtttataggcaggcgctttttcacccacggtattcccctgcttttgcgcggtaacccgaatatggattcacttgtagccgttggcgcgggcgcctcatttatttacagcgtggttatgacctatatgatatcctacaatatgcacgcggtgcataacctctattatgaatcggtagcagtggtaataactcttgtggcgcttggcaagcagctcgaggagcacagcaagcgcagaacagcgtccgctgtggaaaagcttatgcgtttatcgcccgataccgcgagggtactgcgcgacggcaaggaaattacagtacccacaaaagatgtagccgtcagcgaaacggtaattgtaaagccgggcgagagcataccgcttgacggcaaaataataaaaggggaaagcagcgccgatgaatcaatgctgacgggcgaaagcctgccgattgaaaagacagagggcagccttgttacgggcggcagcataaatataagcggcgtaatatatgttacggttactaaaatcggtaaggataccgcccttgcaaaaataattaaatttgttgaggacgcgcaaaataaaaaagcccccatttcaaaaacggcggacaaggttgccggcgtgtttgtgccggtggtaattactattgcggttattgccgcggcggcgtggctgattgcgggtaaggatattccctttgcgcttagggtattcacaagcgtgcttgttatcgcctgcccctgcgctttggggcttgcaacgcctacggcggtaatggtaggcacagggcttggcgccgagaacggaattttaattcgcaatggcgagattcttgaaataacccacaccgtaaaggcggcggtttttgataaaacaggcaccgtgaccgtcggtaaggcagcggtgaccgatatttacgccgacgataaagcgcggcttttgaaaaccgcagcggcagccgaggctgactctgctcacccgctggcgcaagcggttacagcgtatgccgctgaaaacggcataaacgtagcaggcagagccgaaaaaagcgaatatatttcgggtaaagggcttaggtgcattataaacggtgaaaatattctgctcggcaatgcttcgctgcttgcagagggcggcgctgatatatcaaaataccgtgaaacgggcgaaaggcttgcgggtgaaggtaaatcgcttatttacgccgccgcaaacggcgagtgcataggtcttatagccattgccgaccaagtacgggaaacatctaaagacgcttttgcccgccttaaaaaattaggcattaaaaccgtaattttatcgggcgataataaagcctgcgccgagtatataggcgcggcggtaggtgctgatgaggtatattccgaggtcctgcccgaagaaaaagcaaaaataatttccgaaataaagcaaaaatacggcgttgttatgatggtgggcgacggcattaacgacgcgcccgctctgaccgaggctgatataggctgcgccgtgggcggcggcagcgatattgcaattgaggcggcggatattgtgcttatgaaaaacgacccgctcgatgttccgcgcgcaatcagacttagccgactgaccataaccaatataaaggaaaatcttttctgggcgttttgctataacgcaatttgcatacccatagcagcggggctgctttatgttttcggcggcacgcttttaagcccgatgctggcggggcttgcaatgtcgctaagctcggtattcgttgtgggtaacgctttaagattaaggagtaaaaagttatgagcgaatgtgaatgttgtaaaaagaaaaagcaccgcgatgaaaaggaatataagctgcttataaaccgccttaaccgcatagaggggcaggtgcgcggtgtacgctcaatgcttgaaaacgacgcatactgcaccgatattttaattcaggtatcggcaattcaagcggcgctcaacgcatttaaccgcgaattgctttcaaaccatatacacacttgcgtggcggataacatacgcgcgggcgacgactcggttatagacgagcttaccgccaccctgcaaaagctgatgaagtgaggtgataaaaatggaaagagtaatatccgtacccgatatgcactgcgatgcctgtgttaagcgcataacaaacgcgcttaatgcggcagagcttaaattcagcgtatcgcttgaaaacaaaaccgtgactatagacggctgcgagcattgccttgcaaccgccctgcgggaaattgaagatttgggctttaccccaaaggcactttaataaaatatgcaacaaaaaagagagaaaaggggttcttaccttttctctctttttataaagcttttttggctcccacgtagaagggagccaaaaacaatttataagctattttctcacaaaacagctttattaaagcttttcgattgtctccattaagtaatcgccgaactgcgagcaggtagcgccatcctcatggcccgttataacatactttttatcaacctcggtgcagatgtgcagcgctttattcagcttatcagccttttcggtaaagccgatgtggcgcagcagcatttcggtagccttaaacatactggtggggttggcatatgctcccctgcccgtttctatcatacgcggtgcggagccgtgaatagcctcaaacatggcgtaaacatcgcctatattggcgctgcctgccgtgcctacgccgccctgtatctgcgctgcctcgtcggtaataatatcgccgtaaaggttcggcagaagaattacctggaagttgcttcttacacgctcattcacaaggtttgcggtcataatatcaatgtaccaatcttcggcggtaatgccggggtaatcctttgcaacctcgtggcaaagctcggagaacttgccgtcggtcttcttcataatgttagcctttgtaactattgcaacgttggttttgccgttgtttttagcgtactcgaaagcggcgcgagcaatgcgctttgttccctcgttggtggtaaccttaaaatcgaaagccaaggtatcgggaatttccacgccgcggctgccgagaacatactcgccctcggtgttttcacggaagaaggtccagtcaattccaagctcgggcacggctacggggcgaacgttagcatacaggtcaagctcgcggcgcattgccacgtttgcgctttcaagcgtgccgcccttaagcgtggtagtaggcgctttaagaataacgttgcaagcctttatttctgccaaaacgtcgtcgggtatagcctgattgtgcgcaatgcggttttcaatggtaagcccctcaatggtgcgcagctcaattttgcccgcggcaatttcatcctttaaaataaactgcaaaaggcgctctgattcggcggaaattatcggccctatgccgtcgccgccgcaaatgccgattataattttatcaagcttcttgtaatcggtgtagcgcttatcctgctccattttgcgttcgcgcgcaatctgctcgtttaatagtgtgcggaactgttcaaccgccgcgtcaatgtacttttccattttatatcagccttcctttttggtatattcaagcagtccgcctgctttgagtattgctttctggcgctcggtaaatgagcatacaagcggtattttgtcgcctgtggtttcgtctttcagcattatttcgccgctgtccattcccgcaaacacatttgtaagcgttaatttatccgattgattgagcttatcgtaatcatcgggatttttaaaggtaagcggcataattcccgcgtttataaggttagcaacatgaatacgcgcaaagctctttgtaataaccgcgcgaacgcctaaatacataggcacaagcgccgcatgctcgcgcgaggagccttgaccgtagttactgccgcctacaattatgcttttaccgagtgcctttgcgcgctcggggaaggtctcatcacacaccgcaaagcagaactgcgaaaggtgcggaatatttgagcggtaaggcaatattttagcgcctgcgggcataatgtggtcggtggttatgttatcgcccactttaagcacaagctcggctgaaagagtatcggtctgcggttccgatttcgggaaaggcttaatgttaggtccgcgcagaacctctaagtccttagcctcttcgggtgttgcgggggggattaccgcgctgtcgtcaattttgaaagcggcaggcattgtaacgtgcggttcttcacccaaaagtctcgggtcggtaatttcgcccgtaagcgccgcggcaaccgcggtttcgggggaaacaaggtacacgcttgcgtccttagtgccgctgcgacctaagaaattgcggttgaatgtgcgtaatgatacacccgcggaattaggcgaaaagcccatacctatgcagggcccgcaggcacattcaagcagtcttgctccgcttgctaatatatctgaaagcgcgccgcaatccgccagcattgaaagcacctgcttagagccgggcgaaatggaaaggctgacagagggcgaaatggttttgccctttaaaagcgccgcaacctttagcatatcaaaaagtgatgaattggtacaggagcctatgcagacctggtcaacctttgtgccctttaaggattctaccgttacgatattgtcggggctgtgcggacatgctataagcggctttaactcatcaaggtcaatgtctattaccttatcgtaaaccgcgtccgcgtcgcttgaaagctctgtataatcctctcctctgccctctgcttcaaggaatttctttgtaacctcatcagacgggaagattgaggtggtagcgccgagctcagtgcccatattggtaatggtggcgcgctccggcacggaaaggtactttataccctcgccgccccactcgattatggcgcctacgccgcccttaaccgagagtatgcgcagaatttcaaggcttatatctttcgcggtaacaaaaggctttaatttaccctttaaatttaccttatacattttgggcattgtaatgtagtaagcgccgccgcccatggcaaccgccacgtcaagtccgcccgcgcccattgcaagcatacctattccgccgccggtgggggtgtggctgtccgacccgataagggtcttgccgggcttgccgaaacgctctaaatgcacctggtggcaaatgccgttgccggggcgcgagaagtaaatgccgtgctttttggcaaccgactgaatgtagcggtggtcatcggcattttcaaagcccgattgcagtgtgttgtggtctatataagccacgctgcgctcggttttaacgcggtcaagccccatagtctcaaactcaaggtacgccatggtgcccgtagcgtcctgcgttaaggtctggtcgattttaagcgcaacctcgctgcccacggtcatatcgcccgaaagcatatgcgccttaataattttctgtgcaatagtgtagcccataattattagtcctttctcataatgtgtttataagcgttttcaacatgctccgacgcatattttgcggcaagagcggtgttttttgcctcaatagcctcgtaaattttgcggtgctccgcaacagacgcttccgcgcggcttgaatttgtaacagaagcgcggcggtatttctgaattttcttgtgcaacggcaccaaggtatcataaaacgcggtgctgccgcttaatttataaagtgtttcgtgaaagcggctgtccatcagctttatttggtcggggtcttttttattcaggtaaaactcctgaaattcaagcgcctcgcgcagctgtttcagctgctcctcggtgcggtttttcgccgcaagcgccgcaacctggcactcaaggctcttgcgaatcataaaaatatcttcaagatccttttcgttaatgcctataacaaccgaaccttttcccgattcttcaataatgtgctcctgctccaagcggcgcagcgcctctcgtataggtgtgcggcttactcccaactccgcgcttaatttgctctcggtcagaatttcgccgcgctgatatttgccgcttaaaatatcgttttcaagatgatcgaatacctgatctgcaagggatattgttttatgttcaatcataacttcttctccttaggcaaactaaaatcttccgcccgacagctcttttaaatgcttttcaagctcgccgtcggatatggcggtctgtcttccgttctgatattccgtatctacccattccttaagggcgataaccgcggggtcctttttatcaacctcgttttcaccctttaagccgtaattgtggtttatccagtaagctattcccgcaagtccgctggttttacctaccgaaacggaagcagggcgattgagtatcttctcggtatcaaaaatattgtaaatttcctcgtcctttaaaagcccgtcggcgtgtatgcccgcctttgtaacgttgaagtttttacctacaaacggggtcatgggcggtattttatagcccatttcctttttgaaatattcagctatttcggttataaccgttgtgtccataccgtcaagcgagccgcgaagcgacgcatattccattaccatagcctcaagcggaatattgcccgttctctcccctatgccgagcagcgagcagtttaccgccgaagcgccgtaaagccacgcggtagaggcgtttgcaaccgccttgtaaaaatcgttatgcccgtgccattcaagcatttcgctcggtacatccgaatagtgctgcaagccgtaaattatgccaggcacgctgcgcggcagcgcaacctcggggtacggcacgccgtagcccatagtatcgcacgcacgaattcttacgggaattttcgcctgcgccgacattttcataagctcgtttacaaagggcaccacaaagccgtaaaaatccgcccttgtaatatcttcaaggtggcagcgcggcataacgcccgcctcaaacgcttccgataccgcatcaaggtacattttcatagcctcgccgcgggtctttttaagctttttgaaaatatggtaatcgctgcaggaaaccaatattcccgtttccctgatgcctaagtcgcgcacaagtttgaaatcttctttgctggccctaatccatgtggtaatttcgggaaatttaagccctaaagcctggcatttttcaattgcttccctatcctttttactgtaaacaaaaaattcggtctggcggattattccgtaaggtccgcccagctttgacataagcttgtataggttgacaatctgttctaccgtgtacggctcaaccgattgctgaccgtcgcgcagtgatgtgtcggttatccatatatccttcggcatacccataggcaccctgcggtggttgaacgcaacccgcggcacatcctcatatgtataaaagtcgcgatacaggttcggctcagccacatcctgtaaggaatatttgtaattgtcctgttcaagtaaatttgttttacccgatatttcaagcaatgtattcaccctctgtcagtatcattgtatacaattatactgacatttctgcgttttgtcaatatcccgagaagaatatttttgaaaaaatcgggaaaaatatttaaaaatatgtaaggggcgaaaccgtggaaattctaaaggttattataacatcaattgtttcaattgttgtgttatttttgttaacaaaattggtcggaaacaagcagctttccgagcttaatatgttcgattacattgtgagcattacaatcggctcaatagccgccgaaatggctaccgagcttgaaaaccccgagcagccacttgttgcaatggtggtttacggcgttatttcgtttattgtgtcgatctgctgctcaaaatcacttacggtaaggcggcttattttcggtcattcagtggttttaatgcaaaacggcaagctgtaccgtgaaaatttcaaaaagtgccggctcgatttaaacgagtttttaatgcagtgccgcttggacgggtattacgatttatccgccatagataccgcggttatggaggcaagcggaaaaataagttttctgccgcgcgctgcaaagcgaccgctttcccctgaggatatgaatatagttcccgcgggcgagggtgtgttttataatgttataatggacggcaaaattatggataaaaacctgcaaagcgcgggaaaagacaaaaactggctcaacaacgaactaaaggttcaggggtataaaaaggttgatgatatctttatagcagtgcttgacagcagcggcacgcttaacgttttcaccgtgggcgaaggcaagcagaaaaacgatatttacgagtaattccactgtcagtagagtttgttttaaaacaccctaccgacagttatttttaattagaatgatttttaaaacggttcattgtttcatcgccccaaacggcataatataatatcgggtgatatataatgatgaaactttgcaaaataataagaattataaccgtagcgcctgttgcggcggcagctgcggtaacgctgctttttatacacggcaatttctttgtaaacaatatgcactatattgccgcgcttacagcccttacggttattccgctttcggcataccccgtaagccttgtaaaaaaggcggatgaaaggcggaattttcagcgcacgcttgcaattgttttttcggttgccggctatatcggcggtatgctgtttgctcttttaacaagcgcgtcagtcggtgaacgggtgctttatcttacatatctgctttcgggtgttgccattgctttcagctcatttgttttaaaaaagaaaagcagcggccacgcctgcggtattgcaggtccggtagcgctgctggcttactatattcatcctttgtatcttttagggcttatgctgcttctgcctgtaggttatgcctcgcttaaaatgaaaaggcacacgctgccgcagcttatttccggttcggtaattcctattttgtgcctttttgcttcattgctgttatacagcgcactgtaattctgcggcaggtatgaaatattctttattcaagtttataatatacctgccctttttttgcgcgtatttaacggtggctgccgtgccgcccgattgaccgtcataccaggtcaaaacataatctgtgttatcaactaaaaatgcgttgcgcttgaaatagcaacctctgtagtatttattcgccagcataacggtttcgtccgcacgttctgctattttttcatacctgccgcgccacggctcgggaaaacccacgccctgccctttaaacggcaccgcgcaaataagccgcacgtcgctgtgattttctttaagcaaaagcaccgcctctgccgctaaaatatcaaaccccatcgccataccgctgtaaaaggttttacagcctttattgtataagtcaaaaaccgcctcaataagtgaattttcaaccttttcaagaccgccaacccccttctcaagtgaaaagggaaattttgccggtctgtagcctgtaaagcagcaggatttttcaaaaaagctttcttcgcaatcgtttaaaaaaatattcataattaaactctccgggcttgactaaactaatttaatagtttataatcagcttgtattcaggtgattttggttcaataaaggatgaaaacaatggactcaattgatttaaagcttattactcttttgcaaaaaaatgcgcgaacaccgcttaaaattttagccaatcaggtttttctttcctcaccggctacagctgcacgcattgaaaagcttgaaaaagaaggaataataggctcttactcggcaaatgttgaccttaaaaaagccggctttcctataattgcctttattcagcttgaccttgatccaaagcttaaacctacattttacccgtttattcagtcacacccgcatgtgcttgagtgcaactgcataaccgggcgctattcacagcttattaaggttgcctttgaaacaaccgaggcgcttgacgcgtttatcggtgagcttaacagcttcggtcacaccgaaacgcaaattgccttttcaaccccgcagccgccgcgcggcattgggcttgaaacaatcaaactgcaaaaaaagcaaaattagcatttttactgacattgttttacattgaatattataccaaagcattacctgtttgtcaacacttttaaggagtttttttaaaatggacagtaattattttaaatcggttttaccgtttgcggcaagtgcggggcttaaaaccgataatttaagcggcgttatttacggtaattaccaaggctataacatcacaatcacaccaatacagggcggaaaaacctttcagctcagcttttcggtaaagcgcggtgttgatatgccctccgctgccgaaatgcagcaattagcccgcgccaataaatcactcttttttggtgcagcggttgatggctacagggttgattttaatatcaagtccgccggcttcagtgttgcaaacactgttaataaaaagcttatgccggctttatcggcagcagcggcgtatttaagtgccggcggctggcaagcctgctgccagacctgcggagaaacctgcaatatcggcagctattacatatataattctcctgccgtgctgtgcgatgcatgcttcaattcatttaaagagcagcacacacttacccgccgcgagaatgaacaaaagagtgaaaatgtcataggcggcattgtcggcgcgcttttgggctcgctgctcggtgcgcttgcaataatagttatcagccgcctcggttatgttgcggcaatttcaggcgttataatgggcgtttgcacgcttaaaggctatgaaatgctcggcggaaagttttctaaaaaaggcgtgcttatttcctgcattattatgtttataatggtctttttaagctaccaaattgactcggctatttcccttatgtcggtagatgaatacagcaatataggatttttcgggttattccgccttttgaattacgctatggttacaggcggcataaattggggcagttatcttccaagtcttctgttgctttacgcattcacggctctcggtgctgttcccaccgtttcaaacgcgcttaaaaagcaaaacagtctgggtaaaatttaccgaatggattcacctgaaagtgttcaaaacgaaatatagaaaaatacgcccctacaggctatcctgtaagggcgattttttatagctgctgttattccttaacctccggcagacccgcaaccgatgtcaatatcgaaagcagtcccgcaagcagagaggcggatataaccaccttccaatcaacctgcgaaagcattgccgatgtgcctattgtggcagcggcagtctgcgctactgtcttaaccgcgcgtatgccggcagccttagtccatttttcaaacctcttatccataatctcaccccctatactcccaaaatctttttccaggtgtttatacccacgcagccgtcaacggcaagcctgttagccttttgataattgcgcactgacctgtcggtatccttgccgaacattccgtcagcctttacgcccaccttgcgctgcactatttttgtaaggctacggtttgtgtatgtaagcctctttttgcatacggcaactttagctacgctctcgcactctgcgccccatacgccgtcggcaccgaatttcgggaatttaaagccgtccgcaatagcggcggtctgccattccttaacggcggtgtttttattgctcggcttaggtgcgggtttcggtttcggtgcgggcttaggctgctcggcggtgaatatgctgttatacataacgttcttatccacattgccgcttatgccgtctatgcgcccttttgaggtatgctgccatatatcataggtacggttgaaattatttaccttggcgccgtattcggctacccacttgctgatactgtcataccatttgtcggtcatcttctcgttccaaaacgccgagcgacttgagtatatacccattttatagccgagggcgttaagctgcttattaaactcctgcataatgccgagcatatccgcgtttgaaattgtgcgccattcaagaccccttgtattttctacgtctatgtatacgggtgtgtttattttcttgccgttaagcagcctttttatatgcgcaatttcctttgcgacctttgctttattcacggcatatgagaagaaatataccgcgaacggtatacccagcctcacgcactcggcatagttccgctcaaactgcttatcgtcctgcgagggtatgtcgtcacccagccccatacgcagtattgcaaaatctatttgcggtttcaccctttcccagtttatgctgccttgataatgtgatacgtcgattccctttagcattttttatattctcctttattttaatattattgtcgccaccgcacccagaattatgcctataattcctgtggcaatacaaccgataatcgcccttttgtaatatttcatatcctctgccggggcgcgctcaacatattcaagccgtttatcaatgctgtataccttttttgccgtgttttctgtttgtaacgcaaccttttcaacggcggcggtcagcctgcgtatatcacgcacatcgttcttaatttcatctaattggtgaaaaatgttgcgttcgtttgcttccaacgtacttatacgttcatttatgttttcttccgttttaatcaccccctgccttgaaagaagtataaaccagattaaaaccgccattccccgacatattttcccgcccatatattttttatataaaaataaaaaaaacacttgcaaataccaagtgtttatgttatactaaatttcgcaatgttaaaaagcaatcagcttttttatattcgtaatatttttttaaaacgtttagcagcatggagtagtactcaagttggtgacgaggcgcccctgctaagggcgtaggtcggctaaaccccggcgcgagagttcgagtctctcctactccgccataaaaaaaaccgcacaacagtgcggtttttcctttgtttatgcgggttcaaggctatttttaacataagaaaattataaagcgcctattgcaaggtttttagtccttgtaataggcgcagttttcacaatcaatacataccttgcagcctccatcagttaaataaggtcagcctccctgagccatgcggtatagcgttcaaaatcatagggggctgcgccgctgatataatgatttttacacttaattccattatattcccattcaagaagataaaagcggttgctttcgctgtcatacggaattttacctgattcacaggcgctatttgcctctataatacactcagcttcacatacaacggagtgttctctcaaatcggttactttatacctgattttcatatcccgcaaaaactcgtttaccgccgttaaactaagaaaaccgttttcgggttctcttatcataagtgcaaccggctcctgtgaacgtttaataaagctgtatgcgatttttttattgtaataataatccacaaccgcgtcagaaatctgcggccagccgtcaattaaattccaccagataagtcctgttctgcgccatttctgcgacctgaaccgttcgataaaaaacttaaccgcttctgcctgagaaagctggcttgcaagcgaaaatgtctcaaggtcgtcaaaatccttgccgaaaagcgttttaacctgacctgccatcaacgctattctgtaatcataaggacattcactgtcggtttccatacatgcagcatgtacttgccattcatcgttgccctgccagggccacagcttttcgggtgaaataaaccttttcagagaatcaaccgacggacacccgtgatacccggtttcacttgcaaaatgtgcattcgtcgatgtataaaactcgcccttataatagtcgcgcggtccccaaaggtggttctcgggcagaccgttgcggttatcgttaagccacgccctttcgctcacatacggcgagcttggcaaatattctctgtatgggtcaagcctttcaagcaccttgggtatgacctctctggtaatgcggtttttattcgggtctctgcttaaacttttatcaagccaataagccgccgattcatcacactcattatcccccgctcatattgcaatagacgtatgcccgcgcagctttttaacaataaactccgtttcctcgcgcattttttcaagaaattctctgttttgcgggtatgtagcacagcccatagcaaaatcctgccagactaaaatgccgtttttatcgcaaaaatcaaagaactcatgatcctcgtatacattgccgccccagcagcgcaccgcattgcagtttacatcaaccagcatatcaagtgcttttttaagtctcccactgtctcttgaatggaaagcgtcaagaggaacccaattagtacccctgacatatgcttttacgccattaacgtaaaagcaaaattctccgttgccgctgttgtctgtcgtatcgctttttataagccttactgtacggataccgaagttaaatccggctgtgtcaacaatttcttttccgtgatacagggttgccgtaattttatacagattttgctcacccatatcgcgcgcccaccacagcagcggactttcaaccgtgaatgtaagagcaccattattgtgccaaagtttatcaaaataaacgctgaatttactttccttacattcgccctttatatcaagagaatattcggttgaatagtcaccgtcaataaccgtactgaaatttccgcaaatatatgccttattatccgaaatttccgcggttgataaaaatatatcctcaatatagtccgctttcttttctataagaaaacagctgcgccagattccaccggaaacaaatctcggcataatatcccagccgaaggaatgtgccgctttccttaccgacagggcggcggcgttgtatttttggtgtgtcagaacatccatatcaaaattaaacctccgcgcctcaataacggtaggcttaatatgcaccagcagctcattaacgccgttttttattccctttgcggcaaattcgtaggctataaacatattatcggtcgagccgataataccgccgttcaaataaatatccgaaaatgtgtctatcccgtcaaatttcaagtatgcccgttccggaaaattccccgtatattcaaaatcaaccgcataccaaagatgacggttttcaagcctttgaattttcaggggattatcggcataaaacgggtcgtcaattaggcccgctttttgcatatccaattcaaaatttccggggaccgaggcgggaatcggctcaattccgtattcctttaatgccttttcattaaagacattatccgcaaaggctctgcaattttggttttctgcaatataaagtctccagtttttatttaacacctgttctgtacagtacattagcaccctacccttttacgaattgtctgctatttcaaaaaccgctccgtcgcaggggtcaagcagctccggatttccgcggaatatacgccctattcgcttgccgttttgcaggtaaagaccggtttttacaggctcgtttgaataatttataaccgtagctatatttccgttctcggttacagcgaccttcggatgaagctttcttacggtctttttttcaagcacctctttcagaacgctttcataaagcttataggcatttccctcaaataccctgttgcctctgcacagcatatcctcaagcgggaaattaagataataaacccttcccttaccgtaacggttgaccgtaaaaataggatcaccgcaatcgtctcttgcaagaacctcggcggtagtcggacctaatacagttctgcaataccgctcataacggacggtatcgccgttaaaatcaaatgtgccgctgctgtaggtgtcctcagaggatataacagcagagccgaaaacggtttccctcagattgaagaaagcatcagcatttgaaacatacagaaccgctccgttctccaccttttcaagcagctgctcatagtattttgaataaagaggaccgctgccgtgaacagacggcataaaatacaccgcgctgtcaggaatatcgcaattcggggctaaaaagtcaagcgttactcccgcctgcttgccgagtataaagctcataaacgcagtactccagcaatcctgatcctttgtcagcaaaatcaaagcgtcctttttcgggggttcgatttcaaagttgatttcttcaagccagtcgctgaattttttcatctccttcaaaatcggcttcggctgtctgtttatattaagcataccgagctcccgctcaagcataaaccagttatagggcggggtgtcgagctccagctgctcatgagcgcaccaccaaagcactcccgccgcgccgtttgcccagtttgaaataaggttcagcctcataaagctgcccgaaattccgtcgctgcaaatgttcggtcctaaggttcccagctcttcaaccagacacggctttttacctatcgaggcataaagcatggtttcgcaggtgccgtgcataagtgttcttatagaatcaatagggtcgttcctgcaataaggcacaaaataggcatacggatgagtggttaaaatatcgttccaatccgcctgatccgttattcgccatgcgtccctgtcaacactgagcgagtgcatacctgaaatgacggggcggccgggatcggcagcacggatagcgtttgatacggctgctgtccataccattgcctcctccctgcatgaaacctctgacatacagttgcactcattgcctaaattccaggcataaatagcgctgcggtcggaaaaacggcttaccataccccgcaccataagctgctcgaatttaagcgctgtcgggtcggtacacacatttttaccgtagagagcagcgggaacgaaaagcctgccgctcatccagcctgtaataagaccgacaatcagcttcattccgtgtttttccgctatactgcaaaagcggccgaagcgctcaagcattatttcatccaaaaaccatgggttttccggttcgcggcagccctccagcatatactcctttatataacccttgccgccgtaaacgggaataatcggctgaaaatcccgccagttaggaaaaacgcgcaggtatttaattccgtatttcgataaatcgctgagatcgcggtccacctgctcctcatcccagtttttccacatctctgcccccgcatgggacgcccagtaattgcaccccagcataaattcactcatagctcaatttcctttcgtacccttaaaaaatacatttttacttataaatatcgtttttctttataaagtctgttatttcgccaacctcgcagaacgctaaagcaacaaccgtatcggcgccgccgtaatatattgctattctgccggtttcagggtctgtcagagcagaacacggaaatacaacattgggaacgtctcctacgcactcgtaaagggtacgcggattgagcagatagcagtcagccctatgcagcacacgccatggctcgttcaggtcggttatagccgcacccatagaatatgtaagaccgttgcatgatgttgtaacaccgtgatagaagcaaagccagccctcgtcggtttctatcggagtaggtccggctccaacctttgtagattcccatgaataataagggctcataacatggcggtgcttgccccaaaaagtaaggtcggggctctgactcaaaaatatgtcaccgtagggggtgtgccccttatcgcagggacgtgacagcagcatatacataccgtttatttttttcgggaaaagaaccccgtttctggataccggcacggtggcgtcatccaactcttcgaaactttcaaaatcgtttgtttttgcaatgcctatgaccgttccgaggggccatgtaaggtttttgacatacgaaaggtaataagagccttcaatattgcacaatctcggatcgtatccgctgaatatgtaattattattcagccgccagtgtattccgtcgtcggaaaagccggtaacgagcttttgttctcttgttgtcaggtcaaccctgaacactcccgcaaagccgctgccgaaaggaacaaccgcagaattgaatatgctgttcgacttcgggagcgcgtcacgctcaattatgggatttccgctgtatctccaaacaggtccgcggcaatccgacggtttatcctgccaaggtatatttttaagtgaatttccgattattttagccattaaattctctccaatataatttttttaaaacagaccggattttaccggtctgttttccgtatcatcagtttttcagcaggtcctttcttaaatagacaaggtcctgagcatctattttgccgtcaaggttatagtcagcattttcggcatttattccgacagaagcggtatccgccaaatattttttcattcttacaaggtcaataacgttaacctcataatcgttattggcgtcaccgagcatttttgaggtatcgtattcccaatcactgtcagctgcggcggtcatatatccgggcgtatcggaaccgataattcccatttccgtaagcttatcaaaaaggtaatccgcggctcccctgtttgcggcaatgtcggggtgccagccctttccgaagccgtcagaaaactcgctcagatacggcagagggataaagcatattctgctgtctgcggcagaaagctcggaaaccgcgttttcaagagcgggggtaagatttgaattcataagtccgtatgtccatacgatatacgccttgggatgaacttctcttaaatgaaccataaaattctttgccgtatctgttatattttcctctgtgatttcggaatgttccttcatggcgaaagaatcgttcgttccgaggttgactattattatatccggattaacggacgaatggtcaaacgccgtatcgtcaactccgggtaaaagtttatcgtaaagcgtgggcatagcgtccttggtgctgccgtcggaattggcatatatgccgcgtccgctgtttgcaataaggtttacctgtgctcccattttgtcggcaaggattttcacgtagctgtatgtcgcgtcggtattaacatcatccgcggcgtcgttatcggacgttaaaattccgtagcccgcgcttattgagtcgcctacaacctcaatgagtctgctttttgcgggagtaggcgctacaacctcacccgaaaccgaaagttttgtgatttttgcagccatccacctctcgtttgtttttacaagacggatattcgtcacttttgaggcagaaattcccgaagctaaggtgtaccagctttctccctgcttaacctcaagcttctgagagaatttcccgtttatatataccgcaaagtacggtgcctgcgtttccccgttaccggttgaaataaggcattttaccccgcttgcttttacattgaaattaagctctgtaagtccgtaaccgacgcttaccgaattatcctcgcctacggcgcagcgacctatacggtttattttgccgtcattcgggtaaagctccgtatcgtcagccgctaccgaaacagctaccgtgcatattaaaattacaaaggatattataaagctaatatattttttcacaattaacctctcctttctccgtataaatatcagtcggcataagaagccgtcatatactttcgttcaccgcctgctataagcgtgtctgctcctattctgataatctttacctcttttttatcggtatcgattatataggtgttaaagcagtcctcggtatagccgtctctgcttcttataaggtcaacgctttctgcaagcgcatttccatttaaaacgccctttgacgccgtcatacaggaaacgttaagcataagctgagtatgtgttgtgggcagatacgctactccgtcaatatgctgatgaccggtcatatgcgccacaaaggttgcttttacgttgctgaaatccgcttttgcgtgaatatcacgcgcataagtattattttcgtcatatgttttgtcgattgaggttctgcctataaacgcgtcgattatatcggcaataaccgtaggaacgccgtcgccggaggtttcaagtttctgataaaatgtatcatcaacgactttacgggtggatcttgcattttcgggagaatgatatgccagcacaacgctgtagccctcgggcgtgctgttaagcgtatttataaggaaatccacctgtgactgattcatatgcatttcccagaattccgcggtgcttccgccctcgcgctcatactggtcaagagttatcacacgcagcttatgcgcggtgtcatccttataatagtagcctttattttcgctgttctgatagccgtattcattatatagctttgaaaacagctgattgaattttttaacatcggaatcagcccccaccggcataaagcctatgtcgtgattgccggctgttgctataacgtttgtttttcttccgagcatggcattaacgaacgccgaaaatcccgtgcggtcggcatatgcggttatatcgccggtaacggcggcgaagtcggcatgaatcgcttcggaaaaattcatcatattatgaagtcttacaatatcgccgtgtatatccgagccgtgggttataaccgcacaatttcctctttcaacggctatttttcccattttggcgagattatcggcttcgatattcgcagagctgatataacggagctttaagcctgttttctttatatccgtgacctttttggtttctataatatttccttcggggtcgatattgtccttatgagttacaaacacgcgcacatacaggtataaataatgcagtctgtatttatctccgtttttaaaccattttactattccctttgttatattaacgccatcgtcggaatttagcgttgagccgggtcccgcaataaagcctacgcggtagtcgctgttaagctcaatatcaaacaccgtgttttcaactggcagctgaacaaggctttcggttgtaagaacgtaactgttatcctctgtaagctccagctttgtgggagttttgttcacaaaatcgccgagcggcattgttttgtaatccgcagagcggcttgtaacctgctcgccgtaatatgttacattttcatttttaatgttatcaaagtaaacaacatacgggcgcgcggcatattccgtatttttatagcccttgctgcagccgttttcggtcgcgttcggatcggttaaaacggctgtgtatttctcgggaagagtatcaccgttatttactgaatagtatgcctttttaacgccctctgtggctgttttaagctcatttccgcccaaaagtgcggcgcggtggaacaaaacaccgtattccttcatttcgtagcgcgttctggtctgaggaacaagcgcctctaccttgagctgaccgtcggcgtcaatagtcttttccgaaagaataggagtataagcctctgtatagcacggacccgttaccgtttccatacgtattacgttgccggaatcgtcttttttgctcttattggcatactggtcaatataaatacccttactgtctgtaagaagactgtcatcttcaaagccgccgtttcctttacaaagatctgcatcgcctgtacggctgcttttaaccataaggttatctattgcataatcatatgcggttgtggcatcagacttcttcatatcctcacccagtataatacgggttattgcaagcttctttgaactatcaaggtcaaccttaactgttccggtatattcaacccaatctccctttaagccggtaacctcgccttcaaacggaacaggatctttaaatgactcatcgttatagcagtaataaagccaagcgttcagcttcatcggtttatccccgtagttgtaatatgccaccgagaccgtaaaatcaattgaatcaagttcctgctgatgaatttttccgtcccaaaaatcaaagcacaaatttgtatcccaaaagcggttatacctgtaaatccgcagcgctctgcttccctcatatacggtttgcgcgtcggcggctacggcgcttatattcccggttgcctctccgagccttacaaaatcaattgcggctttaaatccgttatcgccctcaatcttatttttaacaaaggttacggatgaatcgtaaagtccctcaaagccctcgctgataatagtattgtgcgtgccgtcctctgaaacctgttcaacctttacttcgtcgatatataaatccgaaagcacttccctgctgcctacgccgtggaacagcagcgccgccgcataaagtgaattatcatcgtctaatgattttatttcgcttgcgtcaacaacgcccgaaacagtcgtccatttttccgaggtgacggttgccgtttcactcagcgtatagtcctgactgtaatatttatcgttgtaaaacagtcttagtatcggttttattccgttgtcgcttaaattttcaccgcccagcctgtatgtggcggatataaagaatttatagcttccgtcggggtatttaacatttgagagatcggaaagattcagctttaccgtattttttgtattttgttcatcggtatatttg

SEQ ID NO: 4464 - DNA, 3520 bp, Unknown
  16S sequences of unknown bacteria
gttttacggtgtgaccgccgactatctgctgggattgaccgaaacaaaaaatcacccaaacgccgatcttgcagatctgcatttgagtgacgagttgattgatctgttgaaaaacgggcggcttgatacagccctgttctgcgaattagccacacacagggattttgtgaagctgctggcggacattgaaatctatgtgaatggtatcgccaccggacaaatccaaaatctgaacgcatgggttgatgtggcaagggcggaaatcatggagaaataccagccgggggagcatgacaagaccgcctatctgctgaacgcaatccatgtgcaggagggcgagtatttcagccgccgggtacatgacgatatagacggtatcatggaggacataaaggaagcccataaggggcgagcagagagtgcgccggagaaatccgttgccgccgaactgaaaaaggatttggatgaggtggcaaacttcaaggggagccgtctggaacaatggcttctgatttactgcaagcaaaaccgtattccctataaccgcttgacggaagaagaaaagcagtggctgatacggataggctccaaatctgattttatgaaatcgcacatatcacggagaggaaagaagaagtaaaacaggcgggagaaccatctcaggttctcccgcctgttctgcgttacaaagcgcttgtttcggtatgttgcgcttctgaaatcattttcgctaattccgtaccgctttccggcattccccgtttcatccactcgacgatccagccaaatatcaaataagcgatagaagaacgaagatatgcaacagcgtttggcagttccggcgaaatttctatctgctccaagagcgtattcaatacgatattctccagtccggcccagtataaggcaaggtaaaagtcagaatgttctttgtaaaaatccaacagactgattagtatttccgagggggaggcgtgttcctggctttcataacgctgtttccatacactggcaaggtggttcgcttcctgccgcagcacatcttctttgctggcaaagtttcgataaaaagaagcccgccctacacaggcacgatctgttagattgctgatgacaataccgttaaaatcctgctttttcatcatttccaataatgttttcaatatttggctgcggacataattgtttttttcctgattgcttgcgttcatgacctgatacaaagcccccttatttgtctcaatttgccgagacgattgactcatctatatttacatgatacaatcgtctcagcaaaaagtcaaggaggaaaaacatgtcgattacatcaaagcgattgatcattttggctgtagtgattgcagctgctttcgtattggggcgtctggctgtcagagcggccctgaacttgctgctcggcggtacgctgtttggagggaattttctatgaaaaacaaacaggaaagggggcggcacagagtgctttggggatttctctatgtgatgacctttgcagccgtttttgttgggtctgcggcaatcaaactgacctacaatcctcttgcgaaagaaacgcaggtaaattggaatgaatcggtaggctccgtctattctgacctttcctacggcgatggggaggcaaacaaatttgacctctatgttcccgcagacaagacaaaagacgcttatgggcttgtggtgtatctccacgccggaggttttacagctggggataaaaaggacgatgccgaaatgctgcaatggctctgctccaaaggctatgtggccgctggggtaaactatacattgttcagtgaacaaaacccaaacgcaagcgtctattcccagtcgatagaaatcaagaacagcattccggcgattgtggaagaagccggaaaactgggctatccgctggatcgaatggcaatctccggcggctcggcaggcggctgccttgccctgatttatggctaccgggacgctgctgaatcgcctatccccgtgaaaatgatatttgaagcagtcggccccggcagttttcaccatcaggattggaggtgttttggcttagacaaaagttcggaagcggcttccgctttgttcagcgctatggccggtaaaatcatcacgccggaaatgataaaagcaaatgattatgaagatgaaattcgggatatttctccggatctttgggtcaacgaaacctctgttccgctgctgtgcgcctatggcgcgcacgacaagatgcagccttttgaagcgtccaagccgctgattgcggcattggaacgatacggcattccgcatgactatattgtgtttccgcattccggccacggcctgcaaaacgacaacaagtgttatgcggcgtatattgacaaaatcaatgcatacttagagcggtatatgggagaatgacggtgaagaaaattttgaaaacactattgattgtgctggcggttctgctcctgctggttgtgatatggctggtttacatgaacaatacccctaccgtgaaatcagggtacacagataacatcgaaactggcgggtcaatcgagaaaacatatctttcatatgggagctatgaaaccgcaagcgttacagtggaagcggaaaaaccgatggaacggtatacggtttattatccctccaatctggaaaatggcagccagacctatcctgttgtgctggtcacaaacggcacaggtcacagggcttccaagtacgcagcaatgctggagcgtctggcttcatgggggttcattgtggtcggcaatgaagatgctgcctccgggacgggaaaaagcgccagcctgacgcttgaatacatattgagtgaaaacgaggacaagaacagccggttctaccgcaaagtggatacggaaaatattggaattacaggctattcccaaggcggagcgggtgcgatcaatgcgataactgcgtatgagaacagcagatatttcaaaaccgcagtcctgctttccccggcgcaggaggcagtggcagttgaaaatgaatatccgtatgatagttccgcaatccacattcccgtgcttctgctcgcagggacaagcgggtggatggaaacggaatatgtacttccgctgaaccagatggaagctatgtttgataaaataagcgctccgaagctgatggcaaggagaacgggggcggaacacgaaaccatgatgtatctcacagacggatatacaactgcatggctgatgtatcagctgcaaggcgatcaggaagcctcaaaagcatttgtaggcggcaatgccgaaatatgcaataacccatattatcaggaccagaagtgtcagatcagcgaggcgaacgagtaaataatatgacctaaagagaaattagcaaagccagccgagccagtcaacggtcaagatgaacggcgcattttttatgcgccgccgttgacagccccgtctgtttttgctaaagggtaatcaaggcgggaaagccctaaaatggcttcccgcccatttcaattttgagagaa

SEQ ID NO: 4465 - DNA, 11277 bp, Unknown
  16S sequences of unknown bacteria
tgagccaaagcgccgtgctgatgaggaaggagaccatcaggaagatggtgatcattgccgccagccattgagcgcttccgaatacgcctaacagtttatcgacatcattcgccaggaagacaaaggatgtcacgcactgtgtgacgcaaagcaagatccagctgatccgcagttcttttccatacaggcagtgcctgtctttttccatatgctggatcatggcggtgagcataaaggtgagatacagcatcagcgcattggaaatcagcggcatgatcgtcatcgtgaatgatgtcgcgatgcctaagaggcagatgatcaggtcggccagcgtataaactgcgtagaagcaaaggaatccgcagatcttcgatctgtgccaaacatcattgagctgcgccatgccccacaggcaaagcagcacgccgagaagatccggcagcagatcgaaaaatgctgcgccgttcgtgatgccgaaatcgatcatgatcagcagcatcccccaaaagattcgtttcatcagatagacctcccttctgttatttgatcgtttctgtccagttctgagtgatatagcagagctcttcgatcatgcacatcgcatgacagaagatgatgaaccattctcgctcagcaagagcaaagagataaaggtggaaagggaaaaatacaggctttcgataccgaacgcggatgatggagcttcgttttccagatccacagcaggatcagcgtcatggggaaagaaatgatatagatccccaacaatgcctcattcatcatcggaatcacccctttcaacattacgataatatgatgaagcggtaaaagcaacggcacctgcataagttggcatgaccgtggataaaccggtcgtcatgaaagcgatgacggcagtcgcgatgagatgaataggcgatatgcggtatctgtgtaaatctattgtatcagttgatcctacgaatagaaagcgcttccaataaatatgacaaaagtgttcgtttatgccggaggatcaacatttaatgtttagaagatcatttaagtacgcacgtcatttgaagcatagagccaaactaagcgggatgatgttcagaaacagatagattagtaagacttggacacgctgtttccatatggtctggtctttcaaaaatatgttcatctcatctgtacgttttgattacatttaacttcatttttagccacttcttttttaatctgagcgggatgtaaattccccggggcttgccccgagataagcgtgatataataagactgacaagaagcaaaaggcaaagatgaagagaacgaaaacagatgagtgagtatatagataaagcccataacgtgtcagtcttgttatatcactatgtgtgcccagcgaaatatcgcagagtgatatttgacgataaggtagacaaggtcttgatacaaacatgtaaagaaataagcaagagatatgatatcaatatcatggaaataggaacagacggagatcatgtgcactttctgatccagtcagttcctatgttggcccccacggaaatagcgagaataataaaaagtataacagcgcgagaaatatatcggttatgtccacaggtgaagaaaaaactgtggggaagcaacatatggagcgctggatattttgtcgcaacagtaagtgagcatgacaatgaaaaacagatacaaaattatgtaaggcgacaaggtaaagaatataccaagatgtatagaagcccaattaagctatttgactagctgggcacacttgataccgcggggcttgccccgcggtagttcatttgctaacgtaataaatcattaacttcatctaaatagtataatagaataatgaatcggaaaagtctttttttatcagataaatcatgataatataaaaggagatgttaaaataaagggctgagtagatctttcaagcttctctgggggaaagagaaatcggaatatgcggtaataaatagaaggatcattgtgctcgctgttatcggtaatggatgaaaaagggaatagctgtgagcggacatctattcgtcttatctgctgatcaaggagggaaatggaatgaaatcaggggcgaagcaatatgtcagggcatgtcggaacatgctgccgttttatgggaagaaagaaaggacatttatcaaaaaactggctgatgatctggatcaggaaaaagattatgcaacgatctgcgaagaagcaggaaatccaaaggatacggcgatggcgtatctggagaactgcgatgaagattatctgatcaaaaaggcgttcaagcgctctttgctcaagaagctgctcctgctcatcttggtcatcatcatcgtattcatcatttatgcatgctatatgctgatcgaatataatcggttggctgagacgcagcagatcattacttatgaggaaataattacagagtattaatttggaataaggaggtaaatatgaattcgatcaacaatgatttgaaaaagggttttagtgtcttgatggttttggtttgcttgtttgctttttctataacagcctttgcagagaatcctataagtttgcaatcgcaaacttatatagaagagacatttgaagatggaagctattttgtcattacgattacagagcatgatatggtgaatacaagatcgaccattacgaaaagtgcgcaaaagaccggaaagcatatggataaaaacggaaatgtattatggaccattactgtaaaggggtcatttacttataatggctctacgtctaaatgcacaaattcctctgtttctgtaaagtcttatgtgtctaattggacggtgtcgggcgctaaggcgtggaagtctggttctacagcgtatgcttctgcacaggggaagatgaaaaatgtcttgggtcagacgacaagaacggtgaataaacaagtttctctgacttgcagtccttctggtaagctgtcttgatgaaaaaagttgtaatgagcgcgtgcattacaacttttctttttgctggatggtgatatgtatggtgtcgccgatgtctttggcgatggcggtgcggatggctttggggatgccgatgatgtaacagatatcgccgttatcgtctttgacgcccatgttgacgatacttccctcgtagggggcatcatcaaatgtggcgtgaacgctgacgcgtccgcatccgaattcttcgcggatgtcccaggggaagatgaggtatgcgccgcctttgcggctggcagcgtggatgacggcgtcaaaggcatagcgtttcttgttcgcgcagcgcatgatctgccgcaatagcttgcctttggccagctcatcgatgagcttgtccatgatgcggatgtgtttcatcagcggatcctggatgtcttcgatgcgtacgccgcagatcgtgccggtcactttcccgctgtcgggatggatctctgcctgggagaaaaaatcgcgcagggtcgtctgctgttgcaaatgctctttcagctgcgcttcgctgtatccgcatagccagcagatgatctctttgacttctgcttcgctccttcccttcttttccgctttggcgacgtacagcgggtaaaggcggctgaagggcatggcaaatacgttttcttcgttcacaaggctccctccttcctgaatattctaacatgacttttgtgatttatgcacatggatccatgtttctgtgttatgatgggaacggtgatttcatggacatgatcgatgatatggaaacggcctgccagctgctgaaggagggtgagatcctctgtatccgcgagggagagcgcgtcttgtttttcggcttgcggaatgagcgtgtgcaggtgatgagcgcacaggcgcactatgtgctggatctttgcgcttttgccgagatgttcgccggcgagcagttcacggtgtggacgcgaagaggcgaagaagagatctgtgaggaaaaagatgcagaatattatagctggacacataaatgataggagttgttggtgatgaaatatccggtgatctatgtaaaaaacttgatgggcgtgcataagcacagcagcgtttcttatgcgctgcatctgcgcatcgtgagcgatgaggcagaagatgagcagcgcgcggcatatcagaagaaggtgctgacgcagatgtatcatatggtggaaaatcagtttgtcgtggcacagtcgaagatcgtggaaaatgacggtgatctgttcgtgctgttcacctctaatctggatcagcggatgctgaagcagcagctgcagatcctggccaatgagctgggggcacgcctcggtccagggacacagctggaatatgcgctgtttcgcagcctgctgctggtgaagggcaagccggcagggatgctcaaggcgaccaaggaaggagatccgatccaccagagcaatgcgatcgcggagaatgcggtcctgctgaagcccgatggccgcaaggtggcgaccaattatctgatgagctacgacgtattcgtagagaggacgaaagcataagaaaaacctgccgcggcaggtttttctataggttatccttgatgggcctcagggcgtctctgacttgtttcgcctcgttgagcatgcggtccagcttggcggcggagggctgttctttctgcagctgcatgtacaggcggatgagcgtctgttcatagcgctgccagctttctgcagcatagtcttctttgcgcagcgtgttgctttcgcgcatcagctgctgaagctgttcatactggtcgaaataacgatgttcgtcttcgatctctttgctcagtctggccagcgtccagtgctgattgtgcgcggtgcgcatggccttgcggccgatgtaggcatcctgctgcttcatggcgtcgttgagggcgttgaattgtttatcgctgatcctttgcatgaccatgagcgcgtggggaagcgctgcgggctttcctgtcgtgtccggtctgccaaacaagatcttcagcgggacattggtctgttcatcgctgaggaaatgcacctttagctggagcgattcagcgatgcggcggatcgtgtcttccttatgggcttcttcagccagatagatcaagatcatggcgcacctcagatctggcgcagcagcctggccccggctttcttcacacagaggtaaagggccgcggtgaggatgagctggatgatgagcaaggcgatgcagagcaaaggcatggcgtttggccacaggatgatcggcgccgcaaacgcgatggcaagcacgaaagagagcatcatgctcaggaagccgttgaaattctgcttgacggcagatgcttcctgttcccagatgagcttaggccggatgaggtcgatgagcacgccgaacaagttggtcatgatgatgctgaggagcgagcccaggatgaacagcgcatcgagccacagcggataagcgagcacgacatgcagcgggatgagcatcagccatgtgcatacggcggagatgaggatgccgcagccggccttggccatcacctgtgtctgcaccggcacagggacatatttcatgaagaacgcatttgtcccttcccgggagacggaggtcgaggagatcatgttgatgccgcccatgaagccgccggccgcaaaggcgatgagcagcgtgatggcccacaggtccgggatgtagcccagcgtgatgggcagggcgatctgcgtgcctagctctgagaaggcagagacgatgatgatcaccagcagcaccggcatgagcagggcggtcagcacacagttcatgaagtagaccggggtgcggaacagcatgcgcagctccttgagcaggaaggcggagaacagcccgtggcgctgtccgcgcatctgtctggcatccgctttgcgattgccggccgcggtctcgcttccgccgatggctcccttgaaatacaggaagcgcgcgcacagcaggaagagcgccagcgcgatcagcgtgatgcccaggtagatcagaagctgcagcatgtctccgtcaaagatggcggatgcggccgccgggatgaaggggaagagcgccgtcccagccctcatcaaggcgttgtccctggacagcagcgacatcagcatcgcttccatgtctgcggtattcatcgaattcagccagaaagagaggccgaacgcgaggacgacggcgaggatgccgccgatcaggttgaagcggtcgcggttgttgaagaaggggacgaagcgcatgatgatcatcgtgagcaggctgctgagcaccagcggatagatcggcgcagtgaagaagatgatgaggaaggcgatcagccccaagggatgaaagcccgtctgcatgaccatcgtgacatacatcgggatcatgaacatcgcggtaaatccgtattcatagatcacattgaccacgaacttggacgagatgatctgctgcggcgtcaggggcagcacgagcagacggtcgatgtcccggctgaaataatagacgctggggatggtgaagatcgagaacaggaagatgacgaacgaggtgcccatcatcgcgatgttcaccaggtagccgggctgtccgatctttcccagaaagtcaaagccgaagtaaaagcccagaaacagcagtcccagcagcggcagcatgcagatgagcacgacgaggtaaaggagggcctttttccatgtcttggtcgtggcatccatggtgttgagcatgccgcttttcagctggatgcggatgagggagagcagcttatgcatgagagatcacctcgaggaagagctcttccaggctctggtcgccatggcctgcgcgcagatcgtccagcgtgccgaaatagacgatcttgccatggctgatgatggcgatcttgtcacagagcttttcggccacttccagcacatgggtggagaagaacacggtcttgcctttggcggcgtgctccttcatcatctgcttcaggtggaagctggactgcggatcgaggccggtcatcggctcatcgaggatccagacctgcggttcgtggatgagcgcgcccatgagcacgatcttctgccgcatgccgtgggaataagagaggatcttgtcattgagggcgtcgcgcatctcaaaggtatcggccagcgatgcgatgcgctgttcgcgcaggctgctctccacttcgtagatgtcgcccatgaagttcaggtattcgatgcccttgagccgcaggaacatgtccgggctgtctgggacgaggccgaagcgcttcttggcttccaaaggctcgctgcggatgctcttgccgtcgatgaggatgtcgccttcatcgggttcgaggacgccgctcatcatcttgatggtggtcgtcttgccggcgccgttggggccgatgaagcccacgatctccccggcgggaatgttcaggtcgatatggtccacggcagtcttgctgccgaatgtcttggtgacgtgtttgatttcaatcatgattttcctccgtattttcgatgatagatcagataagagccgatgcatggcacggcgaccatgatgaggatcaggatcagcatcacggcttcgcgcagcgcatcaggcagaaaagggatgaggatgaagccgaatccgcaggcgaaccagcatcgtccgccgatgcggtgcgtccggttccagacctcttcatccgccagcgcccatggggtcttgatgccggcgaagaaattctgcctgaacagcggcatgtagttgcccagcacgatgaacatgacgcccagcgccatcgggatgagcatcgcgggcgaacctgccgcgccatgctgtgttccccacagggtgatcaggaaaaaggtgaccaccatcatgttgagcatgccgaaggtgacggcataggctttttcgaagcgtcggtagttggcgcggcggggatcgatgcgcggcagtgcgatccccaggacattgatgcccagggtgatggcgaagaccatggtcagaaacacatgctttggcgcaaagtcgtccgcctttccgctcatgtcccagtggatgggcatctgcgcgggcaggatgtcataagtgagcagtgtggctgcgatcaggatgagcagggaaatcgttcccatcagaatgatcttcttcatgtcaatgtcctcctgaggtgagggaagagatccatccgatgatctcatccatcacgcttgtgttcaattcgtagtaaatgtattttccttctttttcgtccagtaccagtccggcgtctttcaggacagagaggtgatgggagatggtcgcagcggacatctcgaatcgtgaggcgatctcgccggcgtttcgtttcccatccttcaacaggttcaagatctctcttcgcgtgggatccgcaagggccttgaacgtcttctggaacatgacatcgctcccttcgtcttttgattctcagtatagcactgcgtctgtgttcgtcaataacattttgatgaatttcgaaatgtttggcagaaaaaggcagcgccttcttcagtgggacatggtgtacatgcagatggcggcggcgacggcgacattgagcgactcgaactgtgccatctcgatgtagagcgctgcatcgcttgcggcgatcagagcttcctccacgccttgtccctcattgccgaagatgagcgcaaagcgggaaggcgcatgcagctgggacagcgggatggcatcgtggtgcagggcggtcgcgtagatgcgcacatcctgctttcgcagctcgtccatcgcttcgcgcaggccgcgctgcacgcagttcatatggaacagcgccccctgggtggagcggatgactttttcattatagaggtccgcgcagccgggagacaggatgacatcgtcaaagccgaacgcatgcgcggtgcgcaggatggtgcccacgttgccgggatcctggatgcggtcgagcaggatgcagcgggatggggcggacaaggtgtgttcaggcatacggcacagcgcggcgatgccgctgccggatacactgtccgtgagcttgcgcatgaccggctcgctgagcgtgcacagcggcaggtcaaaggggggacggggctgatccttcaaggagaagagcagctcgatgagcccggcgcggtgcgcctcttcgaccaggtgcatgccttcgatcaggaacaggccctcgcggtcgcggtgctttttctgatgcaggcggcaccactcctttacctttggattgtgcactgatgtgatttccatgagatccctccgttctctttcaccagtatagcggatttgccggaaaaaagaaaccatgagaaaattcttgaaacgcgcttttttacgggctataatagtactatcacgaaagcgttgatcaggagcagtaaccaggggagcgcctgcaagggagagacatccgtgactgaaaggtgtcttgaggcgaagctggcgaattcacctgtgagcgagagcgaacctctcccgatccactcggttatcatggcaatcaaggtgtgtcgcaagatgaagcaggatggtaccgcgaacgacgttcgttcctgcgcttgtgctttttttttgcaggaaaggaaatgagtatggaaaacctaacacaaatcagagaagcgggtctggaaaagatcacggcctgtgaaagccttgccgctctgcagcagctgcgcgtgctctatctgggcaagaaggggccgatccaggacctgatgaaatcgatgaaagacctccccaaggaggaacgtccggcattcggccagcaggtcaatgcgctcaagcagacgctggcggaagccatcgaggagaagaagaccgtgctggagaagcaggagaccgcggcgcgcttagaaaaggaaaagatcgacatcaccctggggggacgcaaggccaatgtgggcaacatccatccgctgcagctggtgcagcgcgagatcgaagacttgttcatcggtctggggtacagcgtggaagaaggaccggaggtcgagctggacttctataactttgaacgcgccaacatcccgaaggatcatccggcgcgcgatatgcaggatacattctatatcgatgtggagcatcttctgcggacccacacgaccgctatccagatgcgcgtgctcgaaaaggacgcgccgcgtacgccggtcaaggtcatctgcccgggcaaggtgtatcgccgcgatgatgatgatgcgacgcattctcatcagttcacgcaggtcgagggactggtggtcggagagaacatccggctcagcgatctgaagggcacgctggaatttgtcgccaagcgcatgttcggcgagaagcgcgtcatccgcttccgccccagctatttccagttcaccgaaccgagcgtggaagtcgatgtctcctgccatatgtgcggaggaaagggctgcccgacctgcaagggaaccggatggatcgagatcctgggcgccggcatggtgcaccccaatgtattgcgcatggccggctatgatccggaaaaggtgagcggatttgccttcggcatcggcgcggagcgtgtcgcgatgttaaagtacggcatcgatgacatccgtcatttttacaccaatgacatccgtttcctgaagacgttcaccagattcgagtaggagggttcaatcatgttaatttccaaaaaatggttaagtcaatatatggatctcagcgatctgtccatcgaggagatcgctgagcgcatcaccaatgccggactggaagtggaaggcatcgaaaagggcgcgcaggccaccaacctcgtcatcggccatgtcgaaagctgtgtggaccatccggacagcgatcacctgcatgtgtgccaggtcgatgtcggcagcgatattcgccagatcgtgtgcggcgcgcccaatgtggcggcgggacagaaggtcatcgtggcgctgcccggggcaaagcttcccggcggcgagatcaaggaaggcgtcatccgcggacagcagagcaacggcatgatctgttctctgctggagctgggcgtcgacgccaagagcctcaacgatgcgcagaaagccggcatcgagatcctgggcgaggatgccgaggtcggcagcacaaaggtgctggagtatctggggcttgatgatgaagtgctggatgtctccctgacgccgaatcgcagcgactgcatggcggcctttgccatggccaaggagaccggcgccattctcgatcgcaaggtgacgctgccggattaccgcggcgcatccgccatcggtgagccgacggctctgcgcgtagccagcgagagcgagaaatgcccgatctactgcggcaa

SEQ ID NO: 4466 - DNA, 6490 bp, Unknown
  16S sequences of unknown bacteria
cagtatgtcgatgccaatacaggtgaaaatcaggatgatctggaagtgaacgcagctggaagctcttttttcagtgaagcacgactgactaggcagcaatctcgggatagcgccattgatactttgacgcagatgtttcaggacagttctttaagtgatgagcaaaaatctcaactggccgtaaaagctactggagtagcagaagcaatcgagacagaaggcaaaattgaaaatatgataaaagctaaagggttttccgattgtatggtatacattgacggcgatcgggttgatgcaattataaagaccaacggtttgctgaaagaagaagttgcacagatcaaagacattttgattgcagaaaccggcgcggtagaagagaatatttcgattacggaagctcaataacaaaagatcccaaaagccagcggtttttgggatcttttttgtcgaaaaaatccatgtataatgttccacctgcaatacgaaaatcacctcataggaaaaaagtaatctttttgccaatttttctattttattttctgcatttactggtaaaagagagaattttttcaaataaaatattggaaatattcatattataaggttgtgtctttgttgatttgtggtataatatattcatatccagctctctatttttcatcggttaagccaatcttgactagatggagagtaagctggaaagcaagttgaaaaacgcttttgggttttatatgatattttgtcggcggtgatccggcaataggagggaacttgatggaacgagaaaaacgtgaaaccgttggaaatttgaaaatttcccaggaagttgtagctacgattgccaatttcgccaccaaagaaattgatggtgtggcctctatggcttactgccctgcggctgtaaacctaaaaaaatttttgaccaaatcgcaaacggccaaatcaatcaatattgaaatgaatgatgatgtggcggttattgacgtatatgtgaatttaaaatatggagcgaaaataccgattgtttctgagaatatccaaaaaagcgtgaaaaatgcagtgcagaatatgaccgggatcgttgtagcaaaggtaaatatttttgtggtaggcattacctttgacgaggcggcagctcagtagttggcataagccctccaattttggagggcttctttttcgtatcagggaaaatggacagatgataaatcggaggtataaaatgacgaggcgtgaagcgagggaagaggcgttttttattatttttgaacattccttttctggtgagcaagtcgatgatatcattgcaaatgcggtagaaggccgctctttacaaataaacccgtttgcctattctttagcgaaaaataccatcgaaaaaatagaagaactggatcaactaattgagaagcatgccacccgatggaaaaaaaaccgaatctccaaagtttcattggctgtactgcgccttgcactgtacgaaatgaagtttgaggagtctattccggaaagcgtttctattaacgaagcggtagaattggcaaaaagattcggcggagaggaagactcttcgtttgtcaacggtgtattaggtgctatttctcgtgggagtgaagaaaatactctgctaacggaagaggatggacaggcataatgggaatcttccttggaattgacaccagcaattatacgacttctatggcgctgctggattgggaatcgggaaaaataatgcagcagaaaaaactgctgccggtagaaaagggaaaactgggtctgcggcagagtgaagcgcttttccaacatgtgcggcagctgccggatttggcatcgcttttgtttgatacacggacacctttgtctgggattggggtatctacacagcccaggagacaagaggactcctatatgccttgttttctggcaggggaatctcaagccagaacattaggggcggctttacaaattccggtatatccattttcgcatcaggaaggtcatgttgcagcagcactttacggctccgggcatttggactggttcgatcggccatttttggcgttccatttttccggcggtacttctgagggccttttggttcgcccggacagacatcgaatggatattcaaaaaattaccggatctctggacttgaaagcaggacaagcggtggatcgggttggaaggatgctgggattgccttttcccgccggaccgcaattggaactgttggcagaacaaagtacaaaaaaattctcggtgaaaccggttatgaaaggctgcgactgcagcctttccggagtggaaaatcgttgtcgtttcatgttggaaaaaggggaaagaccggaggacgttgcacgatactgtcttgattttttagtagtctctcttagtagaatgacagaattgcttttggaaaaatatccgggatatcctttgctgtatgcggggggagtgatgtccaatcggtatatccgacaagtgatagaaagtcggtttggcggcgttttctgtccgcccgttttttccagtgacaatgctgccgggattgccgtattggcggcacggatggcgcaggaggtctaaaatgccgaacagtacggtgctgagtgtttcacagcttaatcattatatcaaatctctctttgagcagaatttgcagctgaaagacgtttttatccgcggagaaatttccaatttcaaaggacaatatgcatctggtcatctgtattttacgttgaaggataaagacgctgcagtaaaagcggtaatgttccgcaattttgcgtctcgcatccattttactccggaaaacgggatgactgttttggtcagaggagaggttggcgtgtatgatcgggacggcgtatatcaaatatactgccgtgaaatgcagccagacggaattggagatttgagtcttgcttttgagcagttaaaaaagaagctttcatcggaaggattgttcgatccggcgcataaaaagccaattcctcgtttcccacaagtgatcggaatcattaccgccaagtccggtgccgctttacaggatatgttgaatattctgcgccgccggtatccgttggtgacggtgctggtacggtcagtactggtacagggggaaaagtccgcagctgacttgaaagctgccatccgtcagatggatgaactgggcctgtgcgatcttttgattatcggtcggggcggcggatctttggaagatttatggagttttaatgacgaagcgctcgcccgggagattttttgctgccgcacgccgattatttcggctgtggggcatgaagttgattttaccatctgtgatttcacagcggatttacgggcaccaactccatcggcggctgcagaactggcagttccggacaaaaaggagttggaatttcaacttttctcttatgaaagacagatggtgcaaaaaatagaaaaccgaattcatctgttagaagctcagtttggacggcaaaaacgggtaaacgacagtttgaacggccgtttatccgctttgcaggcaaagatagaaggatatcagaatcatcaggcgctgcgttcaccatattacgcgctggcacaagtgaaagcgcgtgttgaagaacaaatatcccggttgaacacattgattcctgtccgattggaacgggaaactgcccgattgggcaaagccgccggcattctggattctttaagcccttttaaagtgatgtcgcgcggcttttcggttatcacaatgcgagggaagatgatcaacagtacccatcagctcaaggcgggggattatgtcacactccggctggcagacggaacggttccagctcagattctgcaaggaggcaaaggcagtgagtaaaaatacagaaaaaaaagagttgtcgctcgaacaggcgatggcccggattgagcaaattttacagatattagatagcggacagggaaccctggatgaatctttggcattatttgaggaaggaaccacactggttcgtttttgcaatgagaaattgcagcaggcaaaattgcgggtaaaagaggttatggcaaaaaatgagtcaaatgaatcagaagaaaacctttccggaacaatggaaagtttataaggaaacgatagagaatgcactggaccggtcgctgttgcagataccctgccgtcaggaaaaagtgatcgaggcaatgcgctactccctgttgggaggcggaaaacgcattcgggcaatcctcgttttggaatttgccaaactgggggggcttcctgaaaagcaggctatgccagtggcctgcgcagtggaaatgatccaggcttattctctcattcacgatgatctgccctgcatggacgacgatgcaatgcgacgcgggaagccgtcctgtcatgtccagtttgatgaagctacggctcttctggctggagacggtcttttgacctgctcttttgaaacggcggttcagtcggcagattatcttccggcctcacgggttcttgcagtagtaaaaaaactgtcggaatgtgcaggatatcaggggatgattggtggtcaagtcattgatttggccagtgaaggaaaaaaaatagatgaacaagcactggaagaaatgtatcggctgaaaaccggcgcattactggaagctgcctgtgtatccggctgccttttagcaggacgtgaagatgaagtgtcttctgcggagaattatgcacgatttttagggttggcttttcaaattgttgatgatatactggatgtaaccggtgatcagtcccttttgggtaagccggttggcagtgatgcggcaaaccaaaaaaatacgtttgtcaccttgttggggatggaaaaatcacgcgaaattgcgaaaagttatacagaaaaagcgctgtgccaattgagcaaattaggtgtagcagatggatttttggtgaatttaacgaacgctttgcttaacagactgcaataaaggatttgaaaaaatggacttgataaaagggctcacggccaattactatattaatgtagccattacagcttggtttttggcacagctttcgaaaacgttgctgacgctagttttgaaaaaaaagcttgtaatggaacgaatgatcggtgccgggggaatgcctagctcccatacagctttagtatgttctctgaccatcgcgatggccagaaaaacaggagtttcctctgcggagttcgccttggcgctggcattggcctgtatcgtgatgtatgatgctatgggggtgcgccgggccgcaggagaacatgcaaaggtactcaacaagttggtattcggattccagcttgtctctgaagaatcggataacccagcagatgatcaaatcgcagaagaactgggagataaggcgttgaaagaatatctgggccatacgccgctggaagttttgggcggtatgctgctgggaattttagtcgcaatgatatttccagtgcaataggaattggaaaagcgagggaaaaggattgttgagaattggataatttgttggatcgattgaagcttccgcaggatttgaaaaaattgtcgttccggcagctagaagcattatgtgcagaaattcgaagtgttttgattcatacggtttccaaaacgggtgggcacctatcttctaatttaggcgtcgtagaattgacggtggctttgcataaaacctttgatgctccaaaagatcagatcgtttgggacgtaggacatcaatcctacacccataaaattttaactggcaggaaaaacaaaatgaataccctgcggcaaaaaggtggcctttctggatttccaaagcctgcagaaagcatttatgatgcgtttatcgcgggacatagcagtacttctatatcggtggcagcgggattagctcgtgccaaaagtttaaaagcggaaccaggttttaccattgcggtgatcggagatggtgcttttaccggaggaatggcttatgaggcgctgaacaatgcagggcattataaggatcggattattattgttttaaacgataatgagatgtctatttccaaaaacgttggagcctttgcacgctatctggcgcaaattcgctcaaaaccggaatattactcaacgcgggataaaattcgaaagtggatatctgctgttcccttggtggggaagccgatggcaaaactggtatctgattcaaaaagctatttaaaagaaatgctttaccacagcaatctatttgaggatttcggatttgaatatgttggtccggtggacggacacgatttggaaagcctttgtgatgcgtttgaacgtgcaaaagcgtcggacggtcctgttttggtgcacgttgacaccataaaaggaaaaggatatagttttgcggaaaagcaaccggatgcctatcatggtgttccgcaattcaacgcaaaattgggcagttgtgaaaatcggccgcaggatttctcggcagttttcggaagctggattgcagaagctgcggaaa

SEQ ID NO: 4467 - DNA, 19772 bp, Unknown
  16S sequences of unknown bacteria
gttgtcccgcgccgcgactggctgcctcggtcttggggctcttatatagtaacagggcgtggtgaaatacggccccatggaggaagaataccgcgctttcctccagcagatgaaggactggtacgacgcaggcttgctggatccggactttgcctccaacgatagcgccacgcagacctccaatctgctcaacggcgtgtctggtgcgttcaccggatattatatcggcggcgtcgccaccatcaaccagaatggccaggcgctggatcccgctttccgctatgtcggcgcgccctatcccatttcgcaggaaggccaaactccacgtatcgggccctacgcctttgaggcgcgcaccagcggccaggcggccatcaccaccgcttgcgagcatccggaaattgccgcgcgcttcctgaactattattacacgcaggaaggcggcttgctcaagaacttcggcgtggagggcgagggctattaccgcgacgaggaaggcaacgtgtacaacagcgaattgctcaccaacaaccccgatgggctcaccctaaagcaggcgcaggctgtatatagccgcggcgattcgcccagcccgggccccgtgatcaaggtgttcgatatcagtgaggaagccaacgaagccctggcattgtggtgcaccatcgcggatgaagtgagcgaaaccgtctatcccgccgccgccacatacacctcggacgaggccgcggagatctccatgctcacccccaacattaatgcctaccgcgaagagatgttcgtgaaattcatcatgggcaccgcggacctggaaaccgaatgggacggctatgtggaatacctcaagaccctgggcgtggagcgcgccctggaaatccggcaggcggccgtggaccgctacaacgagcgctgaaaatccgctcggatactttgccgcggcgggaaggccttccttcccgccgcgccgcgcaggaggttgagcaatgcaaacccggcgaaccatccccatgcggattgcgcgcgagctgcggcgcaaccgctatgtatatctcatggccctgcccgtcatcgcctattatctcttgttttgttatgggccgatgtatggcgcgcagatcgccttccgcaatttcacagccttcaagggcatcacgggcagcgaatgggtgggcatgaagtggtttgtaaacttcatccaggggccgtatttttcgcgcgtgatggtcaacacgctcctcatcagcctatatcagttggtcttcggctttcccgcgcccattttgctggcgctgctcctcaatgagctgggcaacgagcgcttcaagcgcgtggtgcaatccatcgtgtatttgccgcactttatttccctggtggtgatctgcggcatgatccgcacctttgtggcgcgcaatggcatcatcaccgagatgctcacgctgttcggtttcccgcgcacaaacctgctgggggacccgcgctatttccgcacggtgttcgtagcctcgggcgtgtggcaaaccatcggctggaactccatcgtgtatctatccgcgctcaccgccgtgagcccggatttgtacgaaagcgccaccatcgatggcgcgaaccgcctgcaaaaaaccctgtatatcacgctgcccagcatcacgcccaccatcgtgaccatgttcattttgcggctgggccagattatgagcgtgggcagcgaaaaaatcctgcttttgtacaatcccaacacctacgaggtggcggacgtgatttccacctatgtttaccgcgtgggtctgagcgaaagcttccagcccagctattccacggcggtggggctgttcagctccgtcatcaattttgcgctgattttgatcgcgaactcgatcagcaaaaaggccacggaatccagcctgtggtagaaaggagaccatcatgatccgcagcaaatcctttggcagcaggctttttgattacgcgaacattgccatcatgctcctgctcgtgctggtgacgttttatcccttctggcacgtgatcatggcatcctttagcgaccccaaccgcctgtccgcgcacaccagcgtgctgctgtggcccgtgggctttagcctgggcgcgtatgaaagcgtgctaaactaccggctgatcttcagcggttatctcaacacgctgttcattgtgctggtgggcacggcgctcaacgttttcttcacgctcatggccgcctatgtcatctcgcgcaggcagctggccatccgccgcgtgctgagcctctttatcgtgttcaccatgtatttttccggcggactgatccccagctatctgctcatcaacaacacgctgcagctgggcaattccctgtgggcgctgattttgcccggcgcgatttccacctggaatctgctggtgatgcgcaccgcttttttctctgtgccgcaaagcattgaggaatccgcatttttggatggcgcgaacgactttgtgctgctctttcgcatcatcgcgcccacgattatgtccaccatctcggtgatcatcctgttctatgccgtgggccattggaacagctggttctccgcctcgatctatttgcgggatcgtacgaagtatccgctgcagctcgtgctgcgggaaatcatcatcctcagcaacgtgcaggaaatgacggatgcttccgccaccgacgatatggaaaacttgagtgtaaccatcaaatatgctacaatcttggtagcgaccgttccggtgctgttggtatatccgttcttgcagcggtatttcgtcaagggcgtgatgatcggcgcggtgaaaggatagggggaaacaattatgcaaagagtgcaaaccctttatgccggcgcgagcgcgcggcatattggcgccgccgtgcgggaaggcgcgggcgcgctcctgctggagcgcacggtgcacgtggcgccagaatacatcgaatccttccgaccctgcgcggacgaaccggcgggcggggcgctatccggcggcatccgccgcgcgctcgcgcgggatggattcatacaaaacggctgcctgcacgcgcaggcggcggagcaccttctcatggccgcgctggcgaattccggcgcgcaggccttattttgcacggagattctttccgccacgccgcaagagggcggcgtactcgtaacggcgctgtgcctggataccgtgcgggaatttttctgtgaacgctttgtggcggcgccacagccgccctgccgctgctaccacgcgctgatcgcgccgttggatggctttcagccgccggaaggcgcgtgcgttttccccacgatcgatccggcgctgcgcattttgcgcattcccgcggggccggaagagccgctcgcacagttgcggcagcgcgtccgggcggcaaagggcgcgcggctggtgcacctcccttccatctgctgcgcatatggggaagaggaacccggactgctcggcgcgctggacgcgggcgaaaaggagggataacccatgaaattgctgtataacgcggaatctggtctgcaggcggcccatgtgacgccctgctttgcggaaaattgcgatgtgctggtggtgggcgcgggcacggcgggcgccatcgcggccatccgcgcggcgcgcggcggcatgcgcgtgtgcgcggtggaccggctgtccttccctggcggcatgcttgctggagcggtattcggctattactatggcgcgaagggggggctctacgaggaaatcgacgcccgcgctcgcacgcttcaggaaaacgccgaggcgtttttccccagccagggcgtccagcgccttgcccggatgcaggtgctggaggagatgttcgccgaagaaggcgtttgcacgcggtatgaaacctttgtgctgggcgtctttgtggaagaccgtaggatcacgggcgtgcgttgtgtttcgcatgggcgcgtggaagacctttcctgcgcgttcgccatcgacggcaccagcgagggctacctgtgcgccatggcgggctgcgcagccagcctcgggcgtgcctgcgatgggcgcacgcagccgttttccctcgtttcgctctcctgcgcggcgggcggcgggcccacgcggcattccaacagcgattttggctatgtggatacctgcagctgcgaggcgatttcccgcaccgtgctgagccgcgccggggaaattcgcctgggcgagggcttgccgctgggcatggcgtccctcgtgggcgcgcgcgaagggcggcacatccgcggggaagcctgcgtgcgctggcaggactttgtggaacaagcacccatcgaccggcccgtgacctattctatttccaacatggacgaccacggcaaggatatggcgctggaatctccgctgcacgccgactggatggtgggcatgtccctgtggggcgccaccgtgcgcctgcaggtgcccatgggcgcgctgatccccgtggaatacgataacttgtgcgtggcaggacggcatttgtgcatggatcacgattgctcggcgcagctgcgcatgaaccgggatattcagcgcgtgggcgaagccgcgggcgccattgccgccgaggccgtgcgcgcgggtgtgccggccaaagacgcgccttatgagaaaatcctcgcctcgctgctttctactggctgcatggagccgctcgcgggctgcgatgtgtgggacaccaagccgctgggcggcgcggtggactatccgcaatccgacgaggacatgcgcgcgctgctcgccagcgacaagccaggcctgggcatgctctatgccagccgcgcgcgcaaaaccggcctgctgcgcgcgtggctggaagaagcgggggaatggctctccttcaatgcggcttgcgccctcgcgctgatggacgacgcatccggcgcggaaatcctcctgcgcgatttgcacgcgcgcgaccgccgcatgcccgctaccagccgcaaattcaatatgccgcgtggcgttacggctctatattgtctgggacggttggcgcacccggcctgcgaggcagaatgcctgcgcatatggcgggaaaaagacgccttgcttcaggaagccgtggggccggacgaattcttcgcccgtccggaggacacgcagttcgcctatttgagccacgcggcccgggcgctcttgaacctggcggatcgctatcccgagcgccgcgcctccatcgaggctttcctactggatcatgccttccgaccggatttccgcgtttcttattccctcaaggaagggcgcaacctgccttgggacgccacggccgatttgcaaaattacatccgctggcgcatccaaaaccgctaacggcggaaaaggggctgtgaaagagcaaagtttctttcgcagccctccacgcatttttgctttgtttattgctttatgcttgcacaaaatttgcgccaacacgcaaaagtaaatcttttgtttgcggtagagcatttctttggcgctttttctccttgggtctcccatcattgccaaatgaacatttgccatgttctattttgatttttgaattggctttataggaaacttatggtgccattaagcgaattattccgcctcctgattttggatgccgcttcaaaagatgggagggaccatttatgcgaggtccagcgtccatgcgtgaatagtggttgtgggcggcggatatacgcgcctgcgcgatgcgcgagagcgcaatggctggcagcaggatgagctaggtccagtcccaccaatcacaaaacattcgatccccacctccgtacattgctttgcgggccattgccaatggctgtgtgcctctattatatagctctgcggggagaaaatccagcgtttgcgcaagaatataccagtttttttccaagattgccgcaatgcggaggaaaagccgcgcccaaagggccagaaaaaaagcgtgtagcaacaaaagcaaagacagcaaatcgggcatggggtgtattatataatagaagataaagcaggaaataagaaaaaaggaatatggggaaacgatggagcgaaagaagccgaatacagccagcacagtggatgaaggccactgtttgcggtggcctttatggaaatttgggggtcagcgcggcgcaaagatgggctgaaagacgatacagggctttttttgcggttgctgattttataaaaaattaattttttggcagagttaaattcgcttgaaaaccgttcttgttattgatataatattcaacaaacatagtgggagaatccatatgggggagggggaatctgtccttaacaatttatataacaagatatatttattttatacgctatccttatccatgcaggcgattgagcgaaattcgcatggatggaaatttgcgtttgttttataaattcggatgctgttgtgcggggcgcgcagaaggaaagggagacggaaatgtacgcaagggaactgcggcggatctggcaggcggtacctgcgattttgctggtggcgttgcttttgggcaacatggttggtttggcggaaggcgaggagcaggaatttgcctcggaatatggcataaaatatctgatcaccgattctgagagcatgattcctgtggacatcatcaattttaaggcgcggctacgcgagcttggtttttatgtggctggtgtggatgatgcgacgctgcaaagcaggcaactggatgatctcaccatggcagcggtgcgggaggtttgccggctcaatcccgagcttgcctatcacgagcagggtgtgtccaacctgatgtattggtgggtaatgggcgaaggaggctttggggcggatttaaagacgcccttggacgatcgctatcggcggctgcacctgggggaacagggcagcgaggttacggaaatccaaaatcgcctggaaaagctgggttatggcgcagctggctttgaattcacgccgggcgtttatgacgaggcgctgcagggcgcaatggagctctttgcccggagcaacaatttgagcgtggatgctggcgatgagattacggtggaattgcaggagcggttgttttccgaggacgctgtggcatatgtgccgcaggcgggcggtgcggcgctgggcgcaacggaaagaattctgcaatatttttccgccaggagcacggtattggggctttcgcttcccaatggagtgctgtgggccattggctttgtgctggtatgcgttattgtgtttttgttgttcaagctgttttcgccggaagaaaagggcgcgaaggcagacgcgatcaagccgggggagatctgcttcaccattgaatacggcggggaaagctgcgtataccgggacacgcttaagcactatgtgcgcattgggcgcgcgacggaccagttcccgctgaatctggcggataccggcatttcccgcaaacactgcgaaatttattccaaagagggcaaactctttctgcgcgatttttcccgcaatggcaccaaagtcaatggcgccatctgccgccatgcggagcagattttgcattctggcgatgtgctgggcgttggcaaccataaaataacccttcgatacgaaagatagatgggcggttgggagctatggagcgaaaacgcattgtttattgggtgctggcgctgattcccacgctgtttgtgttgtttttgctggcgatgatcaatgtgctgctgatgctgctgagcatcattgcgctattggcagggttgctttttctcaaaaagaaaaggccgggttggtttgctgcgcgcaaagagccggaaccgccgcgtgcttccatgccgtcctggaattcggagccgccgtccgttaagccgaaggtttacatggttttggcgggcagagagcatggcagcatgcaaaggatccaagtgaacaagaccctgtacagcattggacgagaagacgacaacgatttccgcatggagagcggcaaagttggcaggcaccacttgcgcattgaatatgacgagatggaagacgtgtgttatgccatagacaatggctcggtgaatggaacgtttctcaacagcgagcgcatggccccgggcgagcgttaccggctgattcaaggggataggcttcgcattgatgaccgcgaatttgaggtggattacgcgaattattgaaaacgcgctttggacgcttttccgccatttgggtgctctgcgaacggttggcaacccataaaattcgcgccacatggcggatttcctgcttagcatggcagacctctctcccttcgcacgcgcagtttttttcttccagcggattcgggcgctgtgacaaccagagaaaaaggcaaacgcggggatggcccgctgcagaggagtgacgctcgtgtatttcgcatggctgacgtttgtggatgcgtttaaggatgtgtacttccccgaccaggagaactggatcagcacgattatgctgggacagaatgaaacgggttgggagagcgatgcgtatatcgtggcccgtgcgctcgaaggccggctgtatttggcgccaaagcctccgctatgttggatgaacggcacccacaaggagcacgaggttaagggagacgcgctctttaccatgcgcaattctgtcaacggccgcagctttaaaatcatcatcaagcattgccagcgggaatggctggcatttgaaaaatatcgcatgccgcgcagagtggtgattggccggggtgagcgggcggagatccgggatgatagcccgctgatgtcggccgagcacggcattttggcggttgcgcaggatgggtctgcgcggtatcaggatcaatccaacaatggcacctatctcaatggccggaaattgcagcatagcgcgaccaggttgaatgtgggggacgttttggcatttcccacggggctgaaggtagtgtatttgggcgagctgatcgccgtcaaccgcacgagcggcgtgcggagcaagtgcaatctggaaagctggcgcagcgacgcgcaggatcgcgcgccgcaggaggaagagggcgagctgcccagcctgtatcaggaataccagcgctcaccgcgcatgctcgtgaaatgcgaagcggaagatgtggaaattgaggcccccattcccaagcaaaaccagcagccggtgccgctgtttttgcagattggcccgtctatgacgatggttttgcccatgctgatgggttcgctggtggccagcggcgggagcaacctgctttccagcggcgtggtgatgatttccacttcctcctttttggcggtgatgtggggtctggtcaaccgcaaataccgcaaaaaacaagagcagagcatcgagaaggcgcgtttggagcgttatcagcaatacatccaggagatggaaggcgaactctatcagatgaaccaaaaggagcgccaccgcctggaagaaacctttcccaatgcggcgcagtgcgccctgatgccggaaaccaattcgcgctttttgtggaacaggatgcccacgcatccggattttctgtgcgtgcgcgtgggcatgggcgatgtgaacatgccctgcgaaattatcgttcccaagcagaaactatccattatcgacgacgcgctgcgccaggagcccgaccgcctgaaggcagcgtattccgtcatctccaacgcgcctgtaacgctatccttgcgcagcgaaaccgtcattggcatcctgggcggcgtgcgcgccacgatgtttgcccagggcttgctgatgcagattgccgcgctgcacagctatcacgatgtgcacatcgcggtgctgacggaggaaggaagcgcctctcagtggcaatgggcgcggtggctgccccatgtgttcaccaatgaggaccgggagctgcgcatggtcgcctacacgccggatgacgtacacgatgtggtggcccacctggacgaggtgctcaccatccgcaagagcaacgccgcagaggcggccgcgggcgacgcgggcgccggggacggcggcgaggatagcctgccgctgccgcactatatcattttttgcaccaattatcacattatagaagacgaacccatcattcgccagctgctaaacaaccgcgcgggtataacgatggtgatgcttggcacggccatgacgcatctccccaaagagtgccacctcgttttgaatatgcaggggagcgagggctatctccactccagcgagggcgatacgcgcaaggtggattttgaatatccagataggggcttgatccattccttttcccgccgaatggcgccgctgcgcgtgcgggatgtggcgcaaaatgccgccatccccacgctggtatccttcctggatatttatggcgcccgcagggtggaagagctggaagtttggcgcatgtggcgggagaaccatacctacgagggcttaaagtccatcattggataccgggcggggtcgcagccattcgtgctggatatttcggataaataccatggcccgcacggcttgattgccggcaccacgggctcgggcaaatccgtcatgttggaaacgtatattttgtccctggccctaaactacagcccgcgccaggtgcagtttattctcatcgactacaagggcggcggcatggcggacgctttccgcgaactgccgcatgtggcgggaattatcgataacctgcagggcgcgcgggtgatcgatcgcgcactggcttcgctcaatggcgaaattcaccgccgcgaaaagattttcaaggcggtagggatcaacaacatcaacgattacacgcgcaaattcggcgaggaagagggcatggaactgccccacctgatcatcattgtggacgagtttgccgagctgaaaagcgagcagccggagtttatgagcgagctggtgagcgcgtcccgcgtggggcgttcgctgggcattcatctcatcctggccacgcaaaagccatccaattccgtgagcgacgaaatatgggccaattcccgcttccacctgtgcctgcgcgtgcaaacgcgccaggattccatggaaatgctcaagcggccggacgcggcttatatcaagggcatggggcgctgctttatccagatcggcaacgacgagctgtttgaacaggtgcaaaccagctattctggactggactatcgcccggatgaaccgcgtccggaggagctcccccagctgctcaatcccacggggcatgtggtgcgcgcgcccaaaaagcgcgaagaggaaaaagaggaaatccgcaaagtgcgcgatgagatcgccggcctatataaagagcaaagcgccgcgtcggccacggccagcgcggtgggcggcccgcccaaaccggcgggaaaactcacacagatgagcgccgtgctcgcacgcatttcccaggtggccagcgagcatggtatgctgcgcaaccgccggatgtggctgccggagatgaacgagcgcatttatctgcgggatttgtcgtttttccgctgcgctgtgcgggatagcagcggctatcccaacccggcgggcgaaatccgcttgccgatgggcctggcggacgatgtggcgcaccagcgctatctgccttttgtggtcaatctcacgcaaatgcgcaatttgatggtcgtcggcctggcgggttcgggcaagacgacgctcgtgcagagcatggtgtattccctctgcagcatttacgatccggcgcacctcaacctatatatcctcagtctcaccagccaaacgctgggcacgcttgcggccttcccgcacgtgggggatatcgtgttcgatggcgaggagatggaactgcggcgctttgtcaatatgctctatgccgagttggcgcggcgcggcgagctattcgcagcggcctccacggatagtttcctggaatacaaccgggcgcgcatcaagaccgggcaggcaccagaaccggcactgatcgtgttcatcgaccggttcaagcaattctgggatctgttttcggcggacgatgcgtataacgctcgcattcagcagctgattcaagaaggaagcggccgcggcatccattttgtggtgacggccatggcgaaaaccgaggttcccacccggtgccactcctttttcggcggcgtagcgctgcagctgaaggaaaagagcgattataccgattgcattggcaagcgcgtgccctatgagatgcctccgatcgccaccgccattggccgcggcatgggcgtgctcagtggcggcgtatacgagattcaggttgcgctgggcggcgcagagccggagcacgagggagaggggttcgacaacttggcagacgtagagcgcttcgccattgccagcgagattgccccggtggagaacccgcccacggatgtggagcgcgcccagcagatccaggcctacgcgaagaaactggccgggctatggagtggcgcgcgccccgcgcgcgttccgcgcattccgcaaaatcccacctggaaaatgctgtttgaggcggagggctttgccgccacgcaaaagacggaatttgcgatcccggtcggtttcagcatggtggaaggctcggtggcgtcgattgacattgcggacgctccgtcctgggcggtgtatgggccgcgcaagagcggtgtgagcaatttcctcaagcagacggcgcgggtaatgaagaatcgcggcgcggatgtgtatgcgattggcgatgcgggctggaacctgctggcggaggagctcggcattccgctctatagcacgccggagcagatcgtgggatttttgcagatgtttatcgagcgctatgcccgcgcgcgcaagccgctcagggatgcggccctggaaaagggcaaaacggccctgcgcaggcaggcgacgcagtttgccccctgctgcatcctcatcgacaatgccgagcgtctgtacgacgatttcaaccaggaggcataccgcgaacatatgccgctaatgcagggcctgctgcgtgaaatcgccgaaaagccctattacaatttcctgctgatggcgggcatttccaatcctaagccggtttcgtatatgcaggatccggtcaagagcattgtggcgcaggggcgcgcgatcgccctgggcggcaagctggcggaattcgatccgtgcaatgtgggggctgcgctgcccgcgcggttgcgcggtggggcgctggccaaaaaccagggcttcgtgggcaacaatggcgaagcgttccagatcgttgtgccattggcagagctggaacagtagtagaagcgggtggttggcatgctgccggtggtgatttgcgaggagaatcgttccctgcgggagcggtggctggatgtgctcggcaagcttgcgcaggagcggtatcccctcctgcggtttgaggcgctttcgggtggggagcgcgagctgaggcgggccttggaaacggaggatggcattatgctggtcattctcgccgtggaaggggcgatagaaacagggattggtctgttttccagtgtgatggagcgcaatcgggacaattatgtgctcttgtgcctccacaacgccgagcggctggatgcggtgctcagccgctgcatgcgcccagcgggcatattgctggcgccattccgggaagaggccatgcgcatgagcctggaccgggcgctgcgggattacaccgccctgtacgagcaagaaggccaaaatgggtatatgaccttgacctccggaaaaaccctgcggcgcatcgcctatcgggatattcaatatctggaggcgcaggataagctgctcaacatttgcaccaagcgctatgccgtttcggtgcggggcagcctgaacgcggtggaaaaggaattgccgcaagaattcatccggtgccaccgctcgtacattgtgaaccgtttgcacattgagcggctgaatctgccggagatggcggtttatctcgcgaatggggagcggatccccgtctcccgctcatataaagaagcgcttttggaacagctgcgcgcggaggatcaggtatgacgcaggaaaactatgtggaaaggattgtgtttcgccttgcgcggggggaaattgcggcgctcttgcggctgatggactttgccggcctgccgggcgctgccatagagcccgcgcagcccgatgcgtccaccgtgaacgcgctggtggaggcgggcatcatcgttttgtgcgaagggcggattttgctggatcgcaccatggcgctgattttgcaatccgcggcggagagccagtggttcgcccgggcggaaggcccgggcggcaaggcgttgctctatgtgggcgaaaaaatgtgcgtgctgctgacggatgccgggggcggcgcgcttctgctggagccggtgcgcgacctttcggctgcgaggcccctgtttcaaaaaggcgcggcgcggctaggcgcgcggctgcaatatttggcccgcggcgcgcgcgggcagggtacgccgctttgccgcgaaggcggcgcgcagcaggcgggggaattcctggccgagtttgaaagggggagggatttggatgcaatcgatcatcgtggaagtttatgttccggcgacatcggccagctttgatttccggctcccggcgacggcgcgggttggcgaaaccattgaggaaatgatccgcattttggaggcgacgcagcaaaatctgctattcaacaaagcgcagcccatactcttcgatcgggagcgggggcggtgctcaaaaattgggaaacggtgggcgcggctgggcttagggatggctcgaagctcctgttggtttagcgccgatgctccgtcagattttcggggcaaatgggaatttttgcgtttggtgctggaatcatttggttattcacgccgcaaaatcgaccattcatcgcaaattgtggcgcgcgagccgcgcgtgtggtaggatacaatcaccgcaaggcgaacgccacggacaaccagagaaaggggtattgcaacatgggtattggggttcttttggtacaggcagcggagctgatccaggccgccaatgagatgaaccaggcaatggagatttacgagggcgcagtggaaaactgccagaacgccgccgcagacctggcgagcaagtgggaaggcgaaacgaagatcgccttcgtggagcaccaggaaaacgcgtatcagtggcacaagcagattctcgaaatcgtgcgcgaagtcatcgccgtggttcgcaaggctgtggatctttacaacaccatggaagatgcggcgaagagcgccgtgcagggctaagcgagggcatcttaaaggaaggaaggagcgaatatcatggcagaccgcattcttgtcagcacgccagaaatggaaattgccattcagaaatacgaaaacgcccgctcggaattgcaggatgcgtattccaagctggattcggccaagagccatttggacaattgctataaggggcccgcttacatggccctgtgcgcgaggtgggccagcatttacatgaacgtgcgcaccgccgacaacgccatcgatgaatcggtgaacggcctgcgcaagaccatctccaccatggagacgggcgagcagaacgtttccacgggctttgccaatctcgatacgggcaagagcgcgccgacttatctctgatttctggcgcgcagggaagaagggataggctgtggcaacctacgattctgcgaaaacgcgctgcgccgcgcaagccatagcacagctcgctagcggcatgcacagcgcggtggagccgggcatgcgcgcggtgcgggaacgcatggatcttctgcaagggagaacggcgcgcgccatggaagaggcgctcgaccgcctttggcgggaagagcaggcgctgcacggcgaaatggaagcgctcgcgcaccaggttgccacctatgccagtcagctggagcaattggatgagaagctagccaggcggctgtgacgggaggaacccatgagaatccaatggagcggcgatgtggcgcaggaaatgctcggcaagctgcaggaggcaaaccgcggcatgcaagaatgcctgcggcgcgcggcggcggcgcggcagcaaatggccggcgccgatcctgatgggcaaaatcgcgccatgcaggccgcgacagagcggttcgaacggtgctccggcaggttgcagcttctcgccacacaattggaggactttcagcgcgcgctgcgtagggcggatgatcttttcgcggaggcggaggcgcaagccatccacctcgcggagcaaatcgaaccgccacccagcccgcctgagcggcaaggggcagccccggttcgctgggggatagaagcgttgggctttatcacggagcggcatagtggcgcgccgcctttgccggaatggctggaagctcttttgcgttgaagaagcaagcgcgatcctcgcgcaacccaaatatcagcaacaaacccgaaggaggaaaaaccatggcagaatttgatgtaaccctgtccgctgtgagcgaagcggcgacgaatatcgcaaattacacggaaaccttccgcgaagaagcggacgcgacctatcaggcggccaagaccctcagcgaaggctgggagggcgacgcttcccaaacctttgtggaaaacatggagcagctccatcagtggatgaatgaaatggccgccacgctggaaacctacagcgcccagctcaacaaggcgcgcgccacctatgaggaggccgaccgtaccgcggcgggcaacttctaagcgatgcagccccgagacgaagagaagacgctggaagagctggaatcggagctggcgcttacaaacgaactcatcacgcagctggaaacacggatagcgaccttgccgcacaacgatattggcagtattatgcgggaaacgatggaagagctgctgggccagctgcggcggatggaagagaattcgcacaggcttatgcggctgaggcagaagacagaatccgaaggaggacggcaaaatggcgatcattgataacctgaaaatgagcgaggaagccttggaacaggcgatccaaacctttgaaacgaaaaagctggccctggaaaacagctatctgaagatttccaatgaagtgcgcacgctggatggcacctaccatggcgaggccagcgaaaaattcaaggcgcagttcgatgcgctctataagaacctgcagcagaacgaaacggtgatgtccaacgtggtttccaatttgaaaacggcgctggggatctatcaggagcacgagcagcaagccaggagcatgatggaaggcctggatgtcggcacgagctatcaatccaatctgtaacgcgggcagaggggcttttgccgctctagcccggaggaggccggtggcgcatgagcataaattacgaatacgataccgcggccattcgcgcgcaagcgcgccggatcaagttgtgccgcgataagctggcgcaggatgcgacgccgcgcctgcgtaccgtgcagaacctgctggagggcgaattcctcggctgcgcggcgaacgcgctggatcagcgcctggaaaaggagcgcgcggagctgaaattgctggaaggcgagatgcagcttctctatgtggggctcatgcgctacgccgatgccctggaagaggccgatcgccaggccgcagaggcattggcggggcaataaagagacagactttggtctgtttggcttggccgagaggagcgagaggtctgttttatggcaaaaggggcgatcgcagccccaggtcggcaatctggcggccaaggtgaaagggaaatgggggagaaaagcacaatgatgagcgaccgcattctgtacagcagcgacgttctgtctgacgcgatggtggagctgaagcggctgtcgggttctctggaggagattgcgggggatttgtcgcacgtggacacctctggagattggtgggatacaatccgcttttcttccggccgcgcaaatggcactgcccgcgtggtgctgcatctcatccgcgcgggcgtgcaaaaggcggcggaaagcgtggaggccgtgaccgctggcgtggacaaaacgcaaacgctgctggatgaggcagagcgcgcggcgattgcggccgcggagagcgtgagcgccctgcgggatttcgcctatgaaaaggcgggcgaaggcggcggttatcttcccttccagcgcggcgaggaaggcagcgcggcgctgcacgaaccggagcgcggcacgggccagtggcgcagccggagggaaggatcgtggttcggcagcgagactagcccggatggggacaacgtcgtcgcctggattggcaagggcagcgccgctttcgaaacaggggatgtcaagggcgaggtcaatggctatatcggcaagctggaagtcaagcgcgatttcaagttttcgttttacaaggaaacttgggatgacaagcaaaatggcgccgccaagctgatggaaggcacggtgggcgtaggcgtggatgtggaggccctttccgtggatggcagcgtggaagcgggcgacgacatgtttggctcggagctttccgccaatggcagcgtgggcaacgtcgggctttcgggcgaaggcacggtttctgtgggcgaggatggcttgaacgcctacctcagcggcagtgccatagcgtcgattttggagggcgagctggaaggcaagatcaacatcctgggcgtggaaatcacggccactttgggcggctacgtaggcgcagtgggcgttgaaggcacggctgggatccaggacaacatttggaaggtggaaggcggagccgcggcgggcattggccccaaggtgggcatttccatcggcccaaacgaagccggatgggacgctttcttggatttgcttgaaaaataggcggggaaaagggcgccgcgatggccaggcatgcgttttccatggcgattttgcgcccgctctgcggcggaagaaaggatgaaccggcaatgaaaaagtttttgcccattggttcggtggtgttgctcaagggcagcaccaagcgcgtgatgattgtgggcgtgaagcaaaagcaggcggatggggacaaggtttgggattatagcggatgcttgtttccagaagggattctcaacgcggagcagctgtatctgttcgatggcgagcagatcgagcggctgtatttcgtcggcctgcaggatggggaaagcctagaatttttgcgcaggctcaacgcaatggaaggctgatcttcgcgcagcggcgcatccggcggctatgtgccgggtggattcttgccgggagaagggattttgcctatggcttttgagggacaaaagcaaccaacgggtttgacagaggggcgctatgcgccgctctgtttggcgcgcttataaacggttgcgcagtgttttgcgaatgcaatggcggttgctctcgcttacgggcggcgctggccgggagcccttcggcagcaagcagattggaaggcgcgaacgggcggtggacaacagccttgatatatagggccaacgatggaaagaatcattggattgggaggaaacgcagatgagaacctggagaaagatgctcagcgttctggtcgttttgacgatgctggccaccatggtggcgcccattggttttgccacgggcgacatgggcactggcgatgtcgttattggttctggggatcccagcatccctggcggcgcaccgaccggtggcaacgagccgaccggtggcaatgttcccacgggcggcgagccgaccggtggcaacgacccgtccggtggcaacgcaccgaccggtggtaacgaaccggccggtggcaatgttcccacgggcggcgagccgaccggtggcaacgagccgaccggtggcaa

SEQ ID NO: 4468 - DNA, 2823 bp, Unknown
  16S sequences of unknown bacteria
agttcggcacggttgcaggcggcggctatatctggcacaccacgggcagcggcaaaacgctgacttcctttaagacggcgcagcttgcctccaaactggactatatcgacaaggtgctgtttgtggtagaccgcaaggatctggattaccagaccatgaaggagtacgaccgcttcgagaaaggcgcggccaacagcaacacctctactgccatcctcaaacgccagttggaggatgataacgcaaaaatcatcattaccactattcagaagctggccaccttcatcaaaaagaacgccggacacgctgtttttgacaagcacgtggtcatcatctttgacgaatgccaccgcagccagttcggcgatatgcaccttgccattaccaagtattttcgcaagtatcacctgttcggttttaccggcacgccgatctttgccgtcaatgccggagtcggtaaaaagccaacattacgaacaacggagcaggcgtttggcgaccagctacatacctacaccattgtagacgccatcaatgaccgaaacgtgcttccattccgagtggactacatcaaaaccatggatatggagccgaatattgacgacaaagaggtttgggacatcgaccgggaacgggcattttcagcgccggagcgcatccgtctggtgaccgactatatcctgacccactttgaccagaaaacctatcgtggcagcaagacctataccttcagcgtattgcagaatatcgccgatgtggcatctgccagcggcagggccgctattgaggaaatcaagcagaagcagcgggtcagcggcttcaactccatttttgcggtttcctctgtagaggcggcaaagctgtattatgcagaatttcagcgccagatggcggaagcaccccagcggcggctcaaggttgcgctgatctacagctacggcgcaaacgaggcggaaaccgatggcattctggacgaggagaattcggaggatacttctgcccttgatgcgaactctcgtgattttctggaaaaagctatccgggattacaacgaaatgttccataccaattattccaccgacggggacaagtttcaaaactactacaaagatgtgtccctgcggatgaagaataaagagttggatcttctcattgtcgtcaatatgttcctgaccggctttgacgccaccacgcttaacacgctgtgggtagataaaaatctgaagatgcacggattgattcaagcatattcccgcaccaaccgcattctgaactccatcaagaccttcggcaatatcgtctgtttccgcaacctgcaaaagcgcaccgacgacgcgatttcgctctttggcgataaaaacgccgggggcattgtgctgatgcgcggttataaggattactattttggctatgaggatgacgatggaaaataccatcccggttatgccgatatgatcaaggagctgaccgagaagttcccgcttacggaggaacgcattatcggggaacaaaagcagcgggaatttattgttttgttcggcgctatcctccgtatgcgcaacctgctgacctcctttgatgattttgcaggaaatgaaattctttccgaacgggatttgcaggattatctcggcaggtatcaagaccttcgggatgaatggaaaaaccgcaggcccgcaggggaaaaagaggatattaccgacgatattgtctttgaaattgagctgattaaacagatcgaaatcaacattgattatatcctgatgctggtcaagaagtatcacgactcccactgcgacgacaaggaagtcttaattaccatccgtaaggctgtggacgccagtccggagctgcgcagcaaaaaggcacttatcgaaacctttatcgccggtatcaacgatgtagacgatgtgatgctggaatggcgggcctttgtcgcagaagaaaaggagcggcagctctccgctatcatccgcgaggaaaacctgaaagatgcggaaacaagaaagtttatcgaagcatctttccgtgacggctctattaaaacgagcggcacggccattgacaagcttcttcccccaatgtcccgttttggcggcggaaatcgtgcggaaaagaagcagggcgtcattgacaaactaaaaacattttttgagcgatttttcgggattggatgatccacgagtgttcaagtacagcaaaagcaccgaaacagaacggtgcttttgcctactcaggcgcaaaataattattgttcccctcgctcgctaagttattcatagatttatgggaaaaacttgacaaacactcgttctgtgatgtataataaaataatttcaaaagagagcgacaactgaatagcattcttcacattagagtgagagagacggctttcagccggacaacgccagcggtacgctaagagaaagtaccgccgcttctgaactgccttgaactgtcggcagtcgagaaagcgtaaaggacagtttcgactttgaatttcaaagccggttacatgaatgtgaagccaccaccgcaggggataagtctatccttttgcgggaagtcggtacgcatttgtgtgccggctttttttgttgtccgaaagccggttacaacagaatgaccgactggatgggatatgattttgccaagacctcttgtgtgaacagagagagcgaaacgacgctgcggtgagactccggggcagggacagaaaaacgacattcaggcagaccggcgaaaaaggatatgcagcttgcgacgacgtccacagggataacgagcatcggattgtggcccccacaatcccaatccacagcc

SEQ ID NO: 4469 - DNA, 18276 bp, Unknown
  16S sequences of unknown bacteria
tgataggcggtaagccttgaaaaatcaaggaatttcggaagattgaatttttaatcttaatataataagctccccggtttcttggctttccgatacaaagtacaatttcggtgcggtgctgatagtagtcatatggatgagcttcggcgcgggatttttgtcatttatcgcaggtcttcaatcgcttgaccccgtatattacgaggcggcatcaatagacggacttaaaaaccgctggcaagagctttattatgttacatttccgcaaatgggtccgcaattgcttttcggcgccgtaatgtcaatatcgggcgcattttcaataggcggacagtgcgaggcgctcacgggaaacccgagtaccgactattcaacgcataccatacttttgcatatgacggattatgctacggtaagatatgagcttggatatgcttccgcaattgcagtagtgcttttcggtatgatgctgctttcgtggttcattataaacaaggttttaagccgatttaacgcatagggggggataaacgccgatgagatttaaaaaagataaaaaagcgcgtttataccgctcaagaacgggtaatgtgcttacctttgttttcttaggcttgctttcggtatttatggtgctgcctatggtttatgccgttttgcagtcattaaagccgattgacgaaatatttgcgtacccgcctaagtttttcgtaagaaaccctaccaccaccaattttatgacggcgtttaagcttgccgataacctgaccgtaccgttttcaagatacctttttaacagtgtattcgtttcggttgtaggcacggcggtatatgtagttatatcctcggcggcgggctatgcgctttcaaagggtaaatttccggggcgcgagcttatatcgtcgctcgttgtatggactatgcttttcagtatgcaggtgacggctgttccgcagtatttggtaatttccgggcttaaaatggttgatacatattttgcggttattctgccggcactggcgggaactatgggaatatttcttatgcggcagtttgtaacctccgcaattcccgattcggtgcttgaggcggcaagaatagacggcgcgggcgagctgaaaatagttacgggaatagttatgccgaatgttaagcctgcatgccttacgctgataattttcacattccagtcgctttggaacaacagcggtgcgacatacatatataccgagagcaaaaagcttttgccgaatgttttctctacggtggctgcgggcggtattgcgcgcgcgggtgcggcgtctgccgtatcggtaattctcatgattccgcctatacttatattcctttattcgcaaagctctgtaatggaaactatgtcgcattcgggtcttaagtgaggtgcagggtatgaaaaaaatattaaaattaacgctttgcgcggcactttcggcaactgtgatagggtcggcgtttatatgcggggcggattcaccgtcatacgcgccgtacagctcttacgagcttaatgaaagcgaggaatcggttgccgctcctatcggttttactcaaagtgcactttggactgccgaaagcataggagtcggcggcacgcttgctcagccgcaggattttaaggaaaccgaaaacgggttcgttatacttgacagcggcaacagccgaataattgaaacagataagcagggaaagcttgttaagtgttacaattctttccgtgatgaaaacggcggggaggtaacctttaccgaggcacagggtattgcaataaataaggacggcaatttccttgtttccgatactaaaaacggaagaattttgaatttagaccgaaacggtattctgaaaggtacgataacacgcccggacgaggctatgcaggacagtgacgcgccctttcaggtttcaaaaatcgaatgtgccgaaaacggtgatatttatgttgcggttgaaagcgtaaacctcggaattttcgtatttgactcaagcggtaaatttgacagattcgtagcaagtaaccccgtagtaactacggcaagcgtaatacttaattatctttcaagaccgtttatgacgaccgagcagatccgaaaccgaatgcagtctacaccgctcaaggttacaaacttttgtctggatggagacggctttatatacaccgtatcgcaaaacagcaaacaggtgttgcaaagcggaatggtaagacggcttaattatcgcgacagtaatgtgctttcctccgaaatcgtgttcggagaccttgaacgcgacagcgaaaacggaaaggttacgcttttcaattccgttgcggttacggataacgatgatataatactgctcgatcaaagccgaggcaaagtattttattacagtaagggcggctatttgatgaccattttcggcgcgataggcgatcaggacggcacatttgtttcacccgttcaggttaaatattcggacgggaaaatatatgttttggattctgccaagggttgtattaccgaatttaagcccacatcgtatatgactgcgtatttagaagctatggatctgcttaacaagcgcgaatttgacgcgtcccttgaaaagtggaaggaagtaaatcgcctgaattcaaacagcagctacgcctattatggtatggggctggttcacgatatgaccggcaattataaagaagctatgcgatgctttaagctggcggataacaaggcgactttttcaaattcctttaaggaataccgcaaggagtttttaagccgatgggcttggtggcttgttttgggcatagttgccgcagtggttcttattacatttgcggtcagattcactgtaaaagctcttgaaaaacgaaacggtgaggtttacagtacgcttgaaacgaagtggcttttcccgttttacacaataaggcatccgattgacggctttgagcaattcaaaacaagaaagatacagtctttggcactttcgggtgtaattgttgtgatttggatactgaccgagtttttatcggttttctgcaccggctacattttttcggggaacagcgcagcttataatccgttttcaaccgtactttcaacaatcggcttgttctcggtatttgtagcctcaaactggtgtctttcaacgcttaccgagggcaagggaacattctctgaaatagtttcggttacggcatattcgctgttgccctacattttttcaaagctgataattgtactgctttcaaatgttctttgctcaaacgagcaggtgtttatgactataataagcgttataggtcttttgtggagcgcggtgctgctgctcggcggactttacgcaatacatcagtattcattcgggaaaacactgttttccgttttgctcacgctgataggaatgctgattatagttttggtactcgtggtattttacacgcttattcaacaggctttcggatttattcattcgctttatcaggaagcaacgctttaaggaggcggaaatatgaaatatataaaaataatttccgccctgctttctttacttttggttactgcgggtgcggcgggctgcggaaaggcgaatacttcgcaaaagctttatacgccgcacgaaacagaatatacggcggttcagccgaataacaagcaggttacggttttaccaaagcaaataggggtaaacgaggacacctcggagcagtttattattcattacagggaaattgcaagaaatcagaacagcatactgtatgcggataccgaaaaaggcttttttgcacttcaaaacataaataccgaggaaatatggtacagcacaccgaacgattccgaacttgacgaaaaaaccggcggaacggagcgaaacgatgttcgttcgcagataatcgtaaactatgttctgcgctcggaggaaaatacggcgtcgttttaccgcacggaaaacagtcagacgggctgcgttaagggcggaacgctggaaacaagcgaaattgaaaacggaatacgcgtggtatattctttcaaaaaaagcggaattacggtgcccgtaaattattttctcacaggcgacggcttttccgccgaaatagatgtaaagaatatcgacgagggtaaaaagtcctatcttataggtgtaaatcttctgccgacattcggtgccggaaactgggaaagcgagggcagcctgtttgtgcctgatgggtcgggcgctctgataccgtttaacgggcataacgatatgaagacttcgtatgtgctgccggtttacggtgaggaaaaagccgttctcaaaaatcagaaggtcttatcaaatgaaaccgtgcgtatgccggtattcggcacaataaagcaaaataacgcgcttatgggcattatttcgcacggcgacacctccgcctctgtaacggcactttacggaactgattcaaggggctacaattcgatatcctcggttatgaactaccgcacgctcgattcaaaggaaatgtttaaaaatcagggcggtatttcgcgaacgctctaccgcgtttcatcagctcacgcaagctttgatacattccgcaccgattattatttgttggacggcgacagcgccgattatgtgggtatggcagaaaaataccgcgaatacctgacgcgcagcggaaagcttaaaaattccgaattgcaaaagccgacgtttaatatagaaatgtacggtgcggcggatatatcaacgacctttttaggcgtcaaatataataaaacggtaaagcttacaacatttgaagaagctgaaaaaataattaggaccgtaaccgataaaggtatgaactcgctttcggtgcggtttatcggctggagcggcgcgggattgcttaataaaaagctcgatgtcagtgcaaaggcaatgagcgcgctcggcggaaacggtaaattcaaagatctacttaaatttgccgatgaaaactcggtcaatatctatcccgatattgatattatgtcccttagaaagggcagcggagattattcgctttcaagcgatgttgtaaggactatgtttaactacaagggcgagcaatatgtatattcccgctcggtctataacaaactgaccaacgaggattccgtatatctgctgaacggagattccgtaatgcgtgcgtcaaatacattcttcacaaaatataagaataggtttggcggtaatatatcgcttacaggtcttgccgataatctttattccgatttcggttataaaaaaagcgaatataaggataaggcgtattacaaaaatttaactgcactgaaaaacgcatctgatcaatgcaaaagcgtggcggttgaaagcgctaacgcatacgcctttgaatttgccgatcgtatatataaaacgcctgttttttcaagtggatacgatatatacagcaaggatgttccgttttatcagattgttttacacggcttatcggcgcttgtgaccgagcctcttataggttcgcaggattctgaaactctgtttttgaaagcggtggaaacgggcagcgagctgtcgttcgcgggtacatacagcgagacttccgaacttataggctcacggtttgaagataaatacagcacatattacctcggctggatagataaagcaaacgcgctttataccgaatatatgccgttgctcgaaaaaatttacaataaaaagataacagctcacagcgagtttaagagcggagtttttataacagaatatgaaaacggaattaaaactgccgtaaattacaatgaaaccgatgcggatataaacggaacgctttgcaaggcaaaaggctttgtaatacttcagggggagggtaaatgatgaaaaaatcaaagaccgcaagacttactatcgagcagcgaacagctcttaacggacatttgtatgttttgccgttttatataggttttatattcttcttcctgacccccataattaaatcaatatcatatgttttttgtaacgtcagctttgatgttacgggagtgcttaccgaatttacgggtcttgaaaatttaaaatatatttttaataaagaccttgacttcaaagggaatttagtaacttccgtaacagcactgttatggaaaacgcccgtgatattgattttaagcctattgcttgcaatgattgcaaatataaatatgccgggcaagggagttataagatcggttttctttcttcctgttattttgtcttcgggcgtggtgcttgatacaataagggaggacgatattgcaggacttatgatgcgcggcagcgtagtttcagccaacggaagcgtggtttcaagcaattcgcttgcaaatatgcttgagcaggcgggactgagcataagtattgttaatttatttataaatatttccaacaatatttttgacctgctttttaattgcggaataccaatgcttatatttttatcgggattgcagggaatatcgccgtcgctttacgaggcttcgtcggttgagggtgctaccgcgtgggataatttctggaaaataacgcttccaatgataatgcccgtcgcgcttataaaccttgtttatattatcgtagataacttcgcgtcgtcaagcaaccttgttatgcagcaggttcttgccagcgttgagcttttaaagcttggcgaggcttcggctatggtgtgggttttttgcgttataatagcggtaatattcgccgtgttctttgcaatagcaaacaaattcaaaatttttgaggctaattaagggggtggaaaaatgaaaagcaatgttaagccgggaaatttaaaaaaccgtgtttcttccagaagatttttcggcagtcttatttcaaacatagttttatggctgtttattttaggcttgttttatctttttctgttcccgttctattaccttatatcaaccgcatttcagtcggaacagtctgtaaacgatccaagcgttttgtggctgccccattcgctgactcttaaaaatttaaaggacacaatgaatgttctgaattataaggattccgttgttcttacctttgtaataaccgttttcagtacgattatgagcattatttcctgctcactggtaggttacggatttgcacgtttcaggtttaagggcaaaaatattgcgttcgcgttggtgcttttaacaataatcctgcctacgcaggcaattttaatacctaattatctgaatttccgcttttttgatttcggcgggatattaaagcttttaagcccgataactggtttcagttcggtgaatttgcttgaaacaccgtggacttttattcttccggctgctttcggctgcggattacgcggcggtatatttatattcattttccgccaaacattttcggcacagccgcgagagcttgaagaagcagcaaaaatagacggctgcggttcgtttaaaacatattataaaattatgctgccgttggcgcgctcagcaatcgttacggtctgcctgttttcgtttgtatggcattggaacgacctttacagctcggcaatgtacttcgtgggagaaacaagaccgattatgccgattttgaacgagctgcgaaccacgcttgtccaggaagggcttaccgtaagcgttaatatgtcgcaattctccctcagaacatattttgcgtcaggcgcgctgctggcagttctgccgccgcttatcctttatatattcctccagcgctttttcgtgcaaagcattgaaaagacgggaattgtcggttaattcacgggcataccgtgtttaataataaaatacagaaaggaaatttttatgaacaaaaaggtcatatcattatttttaacagctgctttgcttttaacggtgtgcggctgtgaaaaaaatccatcaaagaaagatacctccgatacatattcggagtggatcgaggaaattgaggtatccgacgacgagagcggcagcagcggctctgccggcaccggcagcaagggcactacatccaaaggcaatacatctacgggcaataagaatgtcgataacataggtcacaagggtaccggcaaaaagacggtagataaccttaatttcggcggaaagacctacaccaaaaccattgtcggctctgtaacaaagggtcttacccgcagaatagcggcatttgaaaagaaatacaattgcaaaatcaagcttgtttcgcttcagtgggagcagtacaactctcaggtcgcaacaagaatggcttcgggcgacccgtatgatatttgcggtctgcaaactacatttttccccgaggcggttgtgcaggggctttatgaaccgcttgaagattacatttacgatgcagatacctataattcaaaaacaggcgtcggaatagatatgaatgtcagcagtacatttaattacggcggtcatgtttacggcgtgagcaatcacagcggcgcatacgcttcaatggttcaggttttatactacaataaggtactatttgacgaagcaggacttgacgacccggttgagctttataaaaagggtcagtggacatgggacgcacttgaaaaaatggctaaaaaggttactgagcctgcaaagggtaaatatcttttgggtcgcgatttcggcgggataccgtttataacctcaaacggtcatcagtatacaactattgataaatcgggtaaggtcaaggcaaatctttccgaccccaagcttaataatgctcttacaaaacttcaacatttttataagaattatgtaggtcctaagggctacagcgatgatcctaccgagttttacaacggaaactattatatgttccagcaggtttattcctacggcacgtattatatggcttcttcaatagaaaaatccgctgcttttgagaacgatttcaaaaatctcggcgttgtgccgtatccttacggaccggacaatacaaagaagtataacccgggcgaaggcgcacaggcaaaggcttgcggaaagggcagcggcgcgcaggagcttgttgttgcatggacgaagtttgagcgtgagtttgaagacccgatgaagaatgaagacccatatctttatgactcgacaacccaaacaatgatagataagctgttcgacaatgttctcgacagaatgccgaactataaaacatcgaccaaagctgcgctttcggcatataccgaggcttacaatgcggctcaatccggcggtgattttgtaaaggttataaacgattggacgcctacgatccagagtataatcgacgaatcattaaagcagaaataatgtaatatgctccgcggcgtataccgcggagcatacttgaataatcaggaggaaacaattttgaaaacagtgctttttcagggagattccattacggattgctaccgcttgcgcgataacgataaagctgacgaggataattttctcggaatgggttaccccacgcttgtaaagggaagactggggcttgataacccaaatgaatataaatttttaaaccgtgcgtacagcggcgacagaatagtggatgtatatgccagacacaaacgtgatattataaatcactctcccgactatatgagcctgcttgtcggcgttaatgatgtatggcacgaggttgatgaaaagaacggcgttgatcccgtaagatttgaacaactctaccgaatgcttcttgatgatttgtttgctgcattacccggacttaaagttatgcttatggagcctttttttcttccgggttcgggaaccgaaaactgcgaagaaaagcccgcaagaggctatacatttgcacgcgaagtgcctttgcgcgcagaaatagttaaaaagattgcgaaagattataagcttgaatttgttccgttgcagcatgaaatttcggctgccgcaagcatagcggggaacagcgcaattttaattgacggagttcatccgtcggcaatagggcacgaaattatagcacgcgaatggatgaaacactttgaaaaaataagagggtagaaaatgtctgaaaagattaaaaaatattatatgatcggaaacgcgcaccttgaccctgtgtggctgtggaactggcaagaagggagcgccgaggcaaaggcgactatacgctctgcacttgacagaatgagcgaatacccggagtttaagtttgtttgctcatcttcctctgtttatgaatggatagaggaatttgaccccgaaatgtttgaggaagtaaagcagcacgtagccgagggcagatttattattgtcggcggtatgtatgtgcagccggattgcaatttgccgtcgggtgaaggctttgcaagacaattgctttatgcccagcaatattttaaagagaaattcggagtgaccgcaaaggtaggatataatgttgattcattcgggcataacgaaatgctgccgcaaatgcttaaaaagagcggaatggattattacatattcgagcgccccgaggagcatgaaaagcatttgcccgcaaatcttttccgctggcgctcacctgacggcagctttgttacggcataccgcgtgaccgagccttactgctttaatatggaagattccgaaatgctgaaagagcgccttgatagagttgcctccgagtgcgacggaaacgccgatgaagcgctgttcctttacggtgtgggaaatcacggcggcggacctacaattcagaatattgggcttataaaggaatatcaaaataacggggaaaaagagctttgctttgcagatccgcttgatttctttaaaaatgcagaaaaaaggacagatttgccggaagtaagcgaggaattgcagcaccacgcgagcggttgctatgctgcggtttcggaaattaaaaacgcagttcgccgcagcgaaaacgagctttacgccgcggaaatatacaccttgcttgcaaacagacttttaaataaggatataccgcaggcggagcttaaaaaagcgtggaaggatgtaacatttttacatttccacgatatattgagcggcacggcaatacactcggcgtataaggactgcgaaatgatggcgggcgaggcaagaatgacagccgctcgtgaaacaaacaatgccctgcaaagcgtttcttggaaaattgatacttccgattcgggtaagggcgtgccggtcgtatttttcaatcctttcccgtgggattataacggattggttcaaatcaacaggcataccgtggcggtaacggataaaaacggtgcggcggtgccctcgcagttggttttttccgaaacctacagcgtaacgggcaggagtgatactgtatttaaagcgcatattccggctttcggttacgccacctattatttcccgcttgcagatcagcgcggctatttcaccgcaaacggagaaaatacggaaaccaatgagaatctgctcgtcggtgagaactttttggagaatgagctgttgcgtgcggagtttgatacccacagcggagttattaaaagtctgtacgataaaaagaacgaaaagcaactgttaacgggcaacggtgccgagccgattgtaattgacgagtacgagagcgatacatggagccacggaatttttaaattcgataagcatatcggcacctttaccgacgctgccgtaaccgttaccgagcgtggtccgttaagagtagctttaaaaattgagagccgatataataattctctgcttatgcaggaattttcgcttacagcgggtgaggataagctgcgcgtgaatgttaagctgaattggcaggaaaagcacaaaatgctgaagctgcggtttaattcggcagccgaaaaccccgtgtcttattgtgaaataccgttcggcgttacaaagcgtccgtgcataggaaatgaagaattcggtcacggctgggcggaaattaaaggtgatatcggcggaattgctcttataaacaacagcaaatacagctattcgtttgataagggcgcgctaaatctcactgttgcaagaagtccgctttatgcagaccacgggcaaaagccgcgaagtgataaaaccgcgtttaccgatataggtattcaggaatttgcctatgaggtaacaagtgcggataagagcttttacgagcttgcaaaagccgcaagggagcttaatttcacgccagtaaatatagttgaaaataatcataagggcacactgccggaggaatatacgggaattttctgcaatggcgacggcgtaatgatttctgctgtgaaacgcgccgaagataattgcggaacggttttaagggcatatgaaacgaacggaaagcatacaagcgcggaattttcgggagcgcttatcggtaaaagctttgaaacacactttgcgccctttgaaattaaaactttttatttccctgataacggcggtgatgcaagggaagttcttataaccgaatttgaaatcggagaatgatttatgctttttaatttaaagaagtttgaaagacggacagaggaattaaaacaaaaaaggtatttcgggtttaccgaaatacctgattttaccgtgcttgaggatacagccgaccgcgataccgttcattatgcaatacccgaagaattgtattgttccgctgaaacaatgcgcataggcgatacatattcgggacgggataaatacctgtggctctataaaaaaattcgcctgccgaagaaaaaggacggctgtaagacggtcggaatttttgattttggaaaaacaggggcagggaatacaaacggctttgaatcacttttgtatgttgacggcacgccgtatcaaggagttgatacaaatcacggagatgtggttttcgatggtcttgacagcaaggaaacagagcttgtgtttttactatggacaggtcttgagggcggcggagagcctaaaattcagactcaccgtttaagctgcgcaaaaatcgggtatatggatatggcggcggataagctttattattacgcaaaggctataaccgagacgctgaaagtgttaccgaccgacgacacaaattatgccaagcttaccgatattatggaaagcgcgctgttactgcttaattgggacgacgataagtttcttgacaccgttcctgcggcgcttgaagctatggaggaaaaaattgaaaaatacggcaagcaaagcgatgttaccgttaattgcataggtcatactcatatagatatggcgtggctctggcggctcaagcatacgcacgaaaaggggcagcgctctttttcaaccgtcaaccgccttatgaatgagtatgatgagtataaatttctccaaacccaaccccagctttataaatacataaaagaggacgcgcccgaaatatacggcatgataaagcaacgcgtgcgcgaaggtaaatgggaaaccgacggcggaatgtggcttgaagcggactgtaatattccgtcgggcgaatcgcttgtgcggcagcttaaatacggcatagagtttattaaaaacgaattcggaaaaaagtgcgaatttctttggctgcccgatgttttcgggtatagctgggctttgcctcaaatactgttgggctgcggcataaacacatttatgacaacaaaaataagctggaatcagttcaacagtattccgaatgatctattctggtggaaaggtatagacggcagccgtatactcacctattttataaccacacccgaggttaatacggattttggcgaacgcttttcaacatataacggtactttgacaccgcattccgttataggcagctttaaaaagttccgcaataaggatataacaaacgaaacccttatagcctacggctacggcgacggcggcgggggagtaaaccgcgaaatgcttgaaatgcgccgcgttattgataagctgccgggactgccgaatgttaaaacaacccttgcgggcgatttctttaataaactgcataaagatgcggatgaaaaagcggagcttgtaaaggaatgggacggagagctttaccttgaataccacaggggtacatatacctctcaggcggctaacaagaagaataacagaaagcttgaaataaagctttttgaaacagagtggctttcggtgctggcgggtctgcacggcggtaaatatcctaaagatgagcttgattattgctgggaaaatctgctttgccagcagttccacgatattattccgggttcttcaatacacgaggtgtatgaggacagcaataagacatacgccgatatttccgaaagacttgaaaacacagagcttaatgcggtaaatgcactgacggaaagcaataacgactattatacggcgtttaccgtgtgcccgtttgccggaaaacactttgtgccgataaacagaacggagaacggtatttttaaaactgccgacggtaagacgcttttgagccaaaaaaccgagaacggatacattgtggaaatagaaacagagccgctttccgttataagctttaagtttgaagaaacggcgggaaaccgcgcggtttcaccgtttacagtaagcgaaaacggagcggaaacgccgttttatgccataaatttcggtgaaaacggggcgataagcggtatttttgataaagagaataaccgtgaagttttaaaaggcgagggcaacgctttagaaatttttgaggataagccctgcgattatgacgcttgggatatagatatattctatactcaaaagtgtgagcgaccgagacttttaagccgcgaaataatcgaaaacggggaattacggctggtaatgcgctcggtatacggatataacaaatcggtaataaagcaggatatgattttatattcttcttcccgccgaattgattttaaaactgcggtcgattggaatgagagtcacagacttttaaaggcagcgtttaatgcggatgtcaggagtacaaaggcttcttacgatattcagttcggtcacgccgaaagacctacgcatttcaatacttcgtgggattatgcaaggtttgaggttgcagctcataagtggatggacatatccgacagtaattacggagtaagtattcttaacgattgcaaatacgggcacagcgcaaggggcaacaaaatcagtattacactcttaaaaagcgcaaaattcccggattgcagtgcggatatgggaactcacgaatttacatattcattgctgccgcatgacggtactgccgtaagcggggaaacggtaaagcaggctaatctgctcaatatgccgcccttggttttaagcggcaagtcggctgcggaaaataaaaagctatttaccgtaaacagtgaaaatgtaattatagatgccgtaaaacaggcggatgacggaaacggaataattctgcggctgcacgagtgcagaggcggaagggcaagggtaaatatatcttcggattatgatgtttcttcattcactccctgcaatcttcttgaagaacctacaggggaagaatttaacgggaacggcatttgcgcagatttcaatccgtttgaaattaaaagctttattataaaaggtgattaaatgtattatttattattattggttgcagtaataatgctttctttgcaatttgctgtaaataaatattatcaaaataaaaacggtaatgaaatatcggtttcctttctttatacttgtcttaccggatttacggcagcgttattctttcttgttatgaatcggtttcaggtagcgtttacaccattttcgatattatgtgcattaggtgtttcactattatgtctcagttatatgcttttgggatttcgcatttttgcaataggaaacttttcactttatatgatgtttttaatgctgggcggaatgattttgcctttcctttacggaataatatttttaggtgatgcagatgccctaaaccctctgtcttttgctgcaaggatggtcggtattttacttatgactgtttcccttgttgtttcaaatgtcagaacaggtaagaacggcaatactgaaaaacataaatctgtgattattttgtatgtatgcgtattctttttgaatggttttgtgtctgtaatatctaaattgcatcaaatagaaaagaacagagctgtggtaagtaataataactttgttttttggacgaatctattcaccggaattgtaagcggaattgtgcttttaataatatgtcttcgtaaaaaaagcgcaccgattcttgctaaagattttggaaacggtaagttaatgttagcggttgctatatgcgcggcattagggggcggttcttatttattgcaattgatagttgccggttcgagtattccggcatcggttcaatatccgtttataaccggcggctcggttgttctgagtgcggcatcaggaagaatatttttcggggaagaattacctcggaaagaagtctatggtgtattgattgcgtttttggctacttttttatttttagtgtagatattaacgcataaaaatatttgcttaaatcaaaatactgttttaggagatgaattgatttgatcttaggctttgatataggcggcacaaagtgcgcggtaataaaagcgaaagcagacggcgaaaaaatagaactgcttgataaaagaaagatacccacacggctggatattccgcccgaggaaatgattgaaagtcttatttcacttgccgatgaaatgttagacggcgaaaaagcgggaaaaataggtatatcctgcggcggaccgcttaattccgttacgggaacaattgaaggtccgccgaaccttcccggctgggacaatgtaaggattaccgatattttagaaaagcattataaagcgcccgcaaaacttatgaacgacgcggacgcctgcgccgccgcggaatggaggttcggcgcaggtaagggaacacaaaatatgatttttcttaccttcggcactgggctcggcgcagggctgatattaaacggtaagctgtattccggaacaaacggaaacgcaggcgaaatagggcatatacgtcttgaaagcttcggacctgtcggctacggaaaggcaggctcgtttgaggggttttgcagcggcggcggtttggctcagctgggctacataaaggcgctcgaaaaggcgcagacgggcgtatatccgctgtactttaaaaagggtatgaccgcagctgatgttacggcgaaaacgatcgcgaacgccgcatataagggcgacgaaacggcaaaagaggtataccgcatatgcggcgagcagttagggaaagggatttctgtgcttatagatatactgaaccccgaaagaatagttataggcagtatattcgcacgctccgaagacctattgcgcgagggtatggaaagggcaataaataaagaggcgctgccgcagtctcttaagtgctgcaaagtagtacctgccgccttgggtgagaaaatcggagattatgcggcaatagccgcagcattattgtaggtgataaatatgttaaatgaattgttaaagagatacccctgccttgaaagtgcaagggaagatattgtgaaagccgaaaacacgcttataaccgcctttaaaaacggcaataagctgcttatatgcggcaacggcggtagttgtgccgattgcgagcatattgtaggcgagctaatgaagggctttttaagcaaaagaccgctaaccgaagaacaaaaagccgaaatgaaagctaactgccccgaaatagaggaaaaatatctttcgcttttgcaaagggcggtgcctgcaatagctctgccttcctttacggcgctcaacactgcgttttgcaacgatgttgaaccggagcttgttttcgcgcagagcttaatgggacttggtaaaaaagacgatatattactctgcataagcacatctggcaattcaaagaatgtagttgcggcagcgcttactgccaaggcactgggtattaaaacaataggacttacgggtaaaacgggcggaaaacttaaaagtatatgcgatatatgcgtatgcgtgcccgaaaccgagacatttaaggtgcaggagttacatttgccagtataccattacctttgtgcaagggttgaggaaaaattattttaaattagcaaaacaatatcaatataagtaaaggcaaaatattagaattataataaaaaaggattatggtgattcaaatggaatcacaaaaaataatatgtatcggtgtaaaataccgaggatgcaacagagcgccgagcttgtgaaaagcaagtttggcgctcgttctttttttattcgacaaaataacacat

SEQ ID NO: 4470 - DNA, 2220 bp, Unknown
  16S sequences of unknown bacteria
gaataatttaaagcggctttttgaccgaatgttaaaaagacgcttaagaaaaagacccgactgcggggccttggcaaattgccgggctgcggtcgggtcatatttttatttaattttcgtgggtttcggattttgtcacaaggtcggactgggggattttacccaccgaaacctgcaaaatcagcagcgcatccttaacggtgaccgactccttatcgccgatgtcggcggcatagaaattgacatagtcaagctcgattttgcccaccgccgcctgaagtgcaagcagcgcgtcctccaccttgatttcgccgtcaaggttgacgtcgccctttaccgtctcggcaagcaggttatatcggtcggttgcgcggtcgagaaaatcgcaatatgactcgaacaaagcggtctcgacgtttatgaatttctcggcctccgttctcatggcatttgcataggaaatgtcgtcgatggagtttatggtgacgttgccgattgaatcgacggcggcgtagaaattataaagcgcattttggcgggcgtttgcatattccttggttataagagccatgtttttatagctcacggctcccttttcggtctggccgaagtgcagcaggttaacattgtcaagcccgatttcggcgtcgccctgaacggccgtcttttcgatgtcggatatgagaatttccacgcggtcccattttccctccatgactttcgtcgagcttttgaattgccattccatgttgttttgctcgtttccgtgggtgatgacgagggtgttattggtttcgggctttacgagcacctcaaactgataatatcttgtatagtcaaagcttcttgtatagtcggcgtcgccgtagtttctgcccacccttgcatagaaggagctgacgagattttcgtttccggggaaggtgccgccggcggtttggccgtcgacggtgagggctccgtcggccgaggaatgggcgtttccgcaaaagtcaaagacgtcctcggtgtccttttcgcaggagcaaagcagcgccgggtcgggagccgagtagcaataaacgtcgtcgatgttgaactccacacggtcgccgtttgaattgttgaaccaggtaaagcgcagacggtgaattttggttttgtcggccgtttccaccgcgggagcaagcttttcaaggtcgacaacacagtcgttccagcccttttcgatgttccatgcgtttatgataatgttatagccgtcctgctcgattcccgcgccgtcgtcggttcgggtgacgagattaagctggaaaacgtcgatgccgcgctcgtcatcgtttgcatagtcaaagctgctccacagcgagaaatgcagcttgttataggccgaaatgtcggcggcgcagccggggtcaaagtcaaggaaggccattgcccccacccccgcggggtgatccttataggacgtgaaatttctcatgtgaatacttttgcggccgttctcgtcttggacagagacctcggtgccgtttgccgtccaaaagccgtcggttgagtcgcagtcggtaagatgaaggtcgccgtccttttcataaggcttgacggcattcgacacctttccgccgccggcacactcggaaatcgccgaagcaagggcggtcaccatggcgtcgaaattttcgtcaaaaacggcattgtcgccgtcgttgcttataaatccaagctcgataagagcccccgcaatacctctttcccaagaatttctcgtaattctcagaccgatgtcgccggcattcgggtcgccgtcggcctttgtgccgcggttggcatagccggtaacgccaagaactccctgctgaagagcgcttgcaagcttatatgcagccgaatcggtgttttccttgaaatgataataggtttcaagccccgttgcggcgggggtggcggaatttcggtggaagcttatgacaaaatcggcgccgaaatcgcttgccatgggaacacggtcgcccagctccacggcgacgtcggtttttctcgtatatcccacctcaaagccgattgcctcaagctttgcgccgacggcaattgcaacccgcaggttgtcgtcggcctcgtggcggtcgccgtttgtggcgcccggatcgctgcctccgtggccggcgtcgagccagattttaggcaggctttcggccgaggcgaaaaatcccgccgccggaaaagccgcaaaaagcacgc

SEQ ID NO: 4471 - DNA, 4890 bp, Unknown
  16S sequences of unknown bacteria
taagattttgactctcgcttattagccaatcgcgcttcgcgttctttgcgtctcacccatacgcaggggagcctttggtgcccagcagccctttggtgccaggcgccgatattgtagcatacgctaacacaatttatttccttgcagaaggatttttctatttcaaagcaagaaatacctccaccgcattttctccgcgctaatgtcaacaaaacatccgagaagcgcagtattgaacacagaagaaaaacaccgcgcccggcggggtttgagagaaacctcgtcgggcgtggtgttttaggatgcgcgctcagcgcttagttgccgaagttgaagccccaggggaggccctggctgccttggctctgctgcccgtcctggctgtcctgcccctgctggttctgctgatcactctggccgtcctggccgctctggccgtcctggccgctggcttcgttgttctgcagtgccgactggacctgctcttccacggtgacctcgatctcaaccgtctcgccgttgcggtagacggtcatcttcagcgtatcgccgacggatgccttgccgacgatggcgaccagatcgtcgctgccggtgatctcggtgccgtccacagcggtgatgatatcattgacctgcaggcccgccttggcggccgggccattttctgtaacgctcttgaccgccgcaccgccgggcagaccgtagctctgggtctcctcgctgacgtccgtgacggaaacgccaatatacggcttggagatatagcccttttcaatgatgctctcgacgatgctcttgacctggttgatggggatggcaaagccgatgttatcaatggacgcctccgtgctggaggagctggagtacttggcgttcgtgatgccgatgacctcgccatagaggttgaacagcgcgccgccggagttaccggagttgatggcgcagtcggtctggatcaggtccatggtcacattactggagagggtgacctgccggttcagggcgctgaccgcaccggcggtcagggagaaggtcaattcgcccagcggattgccgatggcgatgacactgtcgccgacgttcaggttgtccgaatcgcccagggtcaccggcgtcagccccgtcgcgtcgaccttcaggacggcgatgtcgttgctctcgtcgtagccgaccagggtcgcgtcatatgtcgtgccgtcataggccgtgacggtgatggaattggaggactcgacaacgtggtaattcgtcagaatatagccgtcctccgagatgacgaagccggaaccggaggcggcggctgtcgtctggaagccccagtagtttgtcgtgacggacgtcgtgatgccgacggtggaattgacgttggccgcatagacctccgccgccgtcatctgcttactggtgtcgatctttgcgacgtcgatgacggagttggcccgcttcccttcctgaacgaccgtatggccgctggcagcgctgcccgttccaaaaagctgctgccccaggacaacgccccctgcgcccaccgcgccgccaacgatggcgcagctcagggccaaggctacgacccgggcgccttttttatgcgtcttcttcggcttttcgggcttggacggctgggccgcaccgcccatgtacggcggcgtctggctgaggtccggccctgcgtagtggtactcgggcgtctcggtctgcgggtacgacgggtcgccgctgccggcgttgccggcattgtagtcgttataatcattgaagccgttgtagttttccatatcattacctcctcggtaagtatcattcgtttgtttacaatgccattataaaacgctaagttgaatttaagctgaaaaagaactgaacaatttgtgaacatccccgctaattttcgcaaaaatttcagcttccattcaggaataacccatagtataataaagatatccccaatcggaggtgttttatgaaaattttgatcattgaagatgaaaagctgctggccgatacgctccagacgctgttagagcagaagggcttcgatgtggaagccgtctacgacggcgagagcggtgcggagtatgccgagcttggcatctacgaccttctgatcctcgatgtgatgatgccgaagctggatggctacgctgtcgcccgcgccgtccgcgccaagcactgcgggacgccgatcctgatgctgacggcccgctccggcgtggaagaccggatcgccgggctcaacgccggggccgactattatctgaccaagccctttgacacccgggagctgctggcctgtatcaacgccttgctgcgccgccagggcagccaggtcgacgagatggtctacggcaacacgtccctggacctttcaacaggcattttggtctgcggcggccagtccgtccggctctcggcgaaggaatttgacgtcatgcggctgctgctgcaggccaaggggcagaatctttccaaggaagtgattctcgcgcgggtctggggctacgattccaacgccacggagaaccatgtcgaggtctatgtcggcttcctgcggaaaaagctccgcagcatcggctccaatctccagatcgccgccatccggcgcctggggtaccatttggaggtcacagaagatgcttaaaaaactacggctcaaattcatctgcatcaccatggccatcgtcacgatcatgctgtgcgtgatcttcggcctggtctacggctcgacgagccagagcctggcgcgagcgtccgtcaccatgctgcagcagctggcggaggaccccttccgcccagagtcagctagccagcagttttctcagatgccccagccctatttcgccgtgcagtacacgacctgggggcagatcactgccatcggcggctattatgatctaaatgacgcggcctttctcagccaggtcatccaggaagccgccgcgtctgacgccgataccggcgtcctgcgttcctaccacctccggttttaccggacgcagcacgggcagatctgctacctgctctttgcggatatctccagcgaaatcacgacactgcagcacctggtccggacctgcctcgtcatcggcgcactgagtctgctgctctttttggggctcagcattctgctggcccgctgggccgtccgccctgtcgaagcggcgtggcagcagcagcggcaatttgtcgccgatgcctcccatgaattaaaaacgccgctgactgtcatcctcacgaacgcagagctgctgcagggcccggccagcaccccggaccgcaccgcccacgcggcatccagcattctgaccatggcccggcagatgcgcgccttggtcgagcagctgctgaccctggctcggtcggacagcggcagccagcgccccgccctgacgcccttggacctgagccagctgattcagacgcggatactcccctttgaagccctcttctacgagcggggcctgcacctgcgcgatgagatcacagacggtctgcgggtcttgggcgacgcccagaccctggggcaggtcgtagatatcctgcttgacaacgcgcagaagtacgccaccggcggcgaggtcatcgtccgcctccagccccagagccacgggcgctgccttttgaccgtgacgaacgaggccccgcccttgtcccaggcggagcttgcaaacctcttcaagcgcttttaccgggccgacccggcccgcagcgccagcggcagcttcggcctgggcctggccatcgccagccaggctgtcgaagcgcaccacggccgcatctgggctgcgtgccacggcagcacgatcacgttttccgtcctcctgcggcaattgccgtaaaagggcccggatttacccttgcgaagtgctgccgcgctgtggtatactacaaccgcatagaataccggcgcgtccgtgccggattctttatgatcttggcacaaaggagtaaggagttatgaaaaaaagagtcttagcgctgctgctttgcctggccatgctgctggcagccgtccccgcggtccaagccgcaggcgtcccctttacagatacgccgcaaagcgcctggtattacagcgccgtggaattttgctatgaaaacgccctgttcagcggcgtcagcgagacccgcttcggcccggacgtacagatgagccgcgccatgctggtggccgtcctgcaccgcagcagcggcaagccgtcagcctccgggcaagcaagcttcctggatgtccggccaggtgcctggtactatgacgccgtccagtgggcggcggactgcggcgtcgtctacggcgagaacacggcccagggcctggcctacgcgccggaccgcagcatcacccgagagcagatggtcgccatcctcttccgctatgccaacctgcagggctacgataccagcgcccgcaacaccctggcccagttccgcgatcgcagccgcgtctcaagctacgcgctggacgccttccgctgggctgtcgccatcggcatcgtctccggcacgaaccgaacgaccctgagccccaccgggaccgccacccgcagccaggtcgcctccatcctgatgcgctttttaaaccgctacgatgacgaccccagcaacgacccgacccccggcgaagagatccctgccgggaccagcgactccgtccaggtcgccggcaagagctaccagatcggcatgacccgggcgcagctcatcgccctggccgggcagcccagcgagcaactcagctgcctggagggctatacctggtatgtctacgggacgaaaacctatgaggacttcgtcatggcgggcgtctatcaggataagatcgtcgccctttgcaccagcggcccgggcttctactaccagggctacagtatgctggaccacaaccccgac

SEQ ID NO: 4472 - DNA, 9015 bp, Unknown
  16S sequences of unknown bacteria
gcaccccacttgttatccagtatatcatactgtctaacaaatggggtgcagttcatttgggttctccgttttttgtaggatagcattatttttcgctgaccagcaggttataagtggtaaagtaccactgtccgccgatctgggtcacataggtggagccggtcatggttttgctgccgtcgtcgccagtgatcttcacatcaaagtccaccaggttgaccgtggccgccttggggaaatcgtcctgcaccgacttcagtttttccgatccggcgttttcgctttggttgatggtcacttccacctggagattttcacccaattcctcctgcatctgctggcggtaggacagatagatgctgctgctcacgccgcccatggtgctcacttgctcaaaagcatcccgcagctcttccggcatacaggaagaaagctcatttaaatcgccggcgtacaggttgtaatagtatttttgcagcagtttctgagggttggactgctctccccgcacagagggaaggatcaggaagatcacagcggcggccaccagcagaagaatgaccaccagcgggatcagaaatacccatttggaatgttttttctccggctctttggcctggacagtaattttgcgcataaataaccaccttttctaaggccgccgggatcatgcgggggcctggtctgtgttcaaaagcaggggcacggcctgacgcagcgaagtcagctgttccatagcttgggcccggctgtggctgtgagccagcagatagcatttgatcttgggctcggtgcccgaagggcgaatggccaaagcggctccgcccaccagttcatagtataccatatcggcgccccggagggaaaggggttttgtttcattttccgtcaaagaatgacaaagtccgcttttgtaatcccgccagcaggccaccggcaaagagccaagatgacgaggcggatgctgccgcagctgctgcatggtctgggccatgcggacctgggcgttttcgccggaaaaggacagggaaaaagcatcttccagatagtagccaaaggcggcaaaaagctgctccagccgatccaggggcgattgtcccttggccaggaggcaggcggccaggtggcagaaggccaaggcggcggccaggccgtctttgtcccggcagtgagagccgatcatgcagccgatggcctcttcaaaggcaatgatgcaccggccttttccttcctgctccagttggcaggccaagggagccatattcttgaaaccggtaaaggtgtcgatgcactgggcgccgtggctttgggaaatggcagcggccagtttggtggtgacgatgcttttgatcaccaggggcggaaggggagaagcttggtgatcctccaaggcagaaaggagaaaatccgtaagaagggaaccggcctggtggccggacaggctgtggtattcctcttggtgcagcacctggaaggccactcggtcggcgtcaggatcggtggcgatgatcaggtgagcgccgatgcgccgggcttcttccagggccaggtgaaaggtctccgggttttccgggttgggggccggtgccgtgggaaaagtgccgtccggctccatttgggaagagacgcagtgcaaatcggtaaacccctgttttttcagcagccggggaagaagcaggctgcccactccatgaaggggtgtatagacgatgcgcagccgggcccgatcctccggcagagaaaccgggggaacatcctggaccaaagcatccagataggcattgtcggtttcctctcccaagggaatcaccaaagaggcatccccttccggcagagcacagggcagggagatgcgggccatctcctggctgacagcggcacattcttcatcggtgagctgggccccggtatgggaatacagcttacatccgttatattcttttgtattatgactagatgtaatattcattccgccagcggcgccggtgtggatgacggcaaaggaaagctccggcgtggggcgaggatcggtgaaaaagtgtaccgggatgcccaaggaagtgaaggcctgctgggcggcccgagccagttcagggctgctcaggcggcagtcccggcacaggcagattcctttttgccgaacttcttccccttgggaggacaggagaaagcggccaaaggccagggcggcctgggtgatggtaaagcggttgactccgccaggccccagagcggcaattcccctgagtccggcagtgccgaaggaaagggcagactgaaaagtggggctaagagtctctggagaagaactcgagagggtatttttttcatcctgggaaaggaaagggctttggaaccactgatccagggctgttttccagttttccatcatcacaatgacctcctgaaaaaggggatgttgtgcttttatcataccatgttccggaaaaaagagccaggcatcaaaaaaactttacgggaaattgcttttcaaaggaaggaaaagcaggtaaaataagggtggaataataaatggagtgaagaaaaatgaaagcaacacagtatattacagtggatatggggccggggaagcggatcgccctggtggcccatgacaacatgaaacaggaaatgatcgactgggccatggagcatcgccaggagctttcccagcataccctgtgcggcaccggcaccaccgccgggctggtcagccgggccaccggcctgacggtcaccggctatcgcagcggccccctgggaggcgatatgcagctgggaagccggatcaccgaaggggagatcgatctgatggtctttttctgggacccgctgactcagcagccccacgacccggatgtgaaagcccttctgcgcattgccgctttgtataatatcccggtggctaccaaccgggccaccgccgatttccttttgtcctctccgctgatgcacgagacatacccccggcggctgatggacttttcccagcatatgcaggcccggatcggagactgaacaaaacagcccttcctttgtgcaaaaaggaagggctgtttttttgttttaatatcccaggtctttcacggtatcctggagcagctctttttgggaaaggggggctgcactcagaagaagcgtgttctcaatgcgggaataaacatagaagatgtctttgtagacaaaggattcccgctgtgtatgctgggaagaagaggaggagcggctttggatcgtcccttcggcttgatcccagttgcttttcagcaggacaaaggcagaacgggcctgatcttccaaggaaaaggaaaaaaactgcacatagcagccatccttgctggcctcccaggcttcctctgttcctgtatatgtaaggatcggctgggacagaagatacccttcctcttccatctgctgagcaaattcctggggaagcaggggtgtgggggaaaagaaggtgaaaaaagcccagatggccccggccgagaggagcaaaagggaacctgcgatgatggcggcccatttccatgcccttttcaaaccggcagcgctacggggattcctctccgggtgttcctgaagcaagtgatccagttccctctgggcctcagggccgaaggcctgggcgatccagtgaggatcgtatttgtcgttgtttttgttgaaggagtaggcccggcgcttttccatggaatacttggcggcccgtcccggttgggtgaaggaaacggcatcgatataaatggtgaaaaagctgaggatgggcagcagatgccggtagccttccagcaagtggaggtaataaatgtccagcagatcccaggtgtccaggggcttggcgatctgggcaatctgccgtccttcctgaaaaatgctcaccacatagatctttcctataaaccggggatagcagtcgtattgctcttccccatagcaaatggtcagttgggaggtgagcaggccgtcgatctgggtatagaaagaaccctgctgctggccggtttcgtccaagacctggtattcctccactttggccgaggtgcccagaaggaatttgtatttggtaaggctgcgaagggcgttgtccagcagctggtaggaagtgtggtaaaggggttggtcctgggcgtcggaaaaggtgagccggcgcattttttctgcctccaggggcaggcgcaggtcggcccaaggggtctgggcctgaaagaggagctgcccttgttcctccacctggaagagattttggccccttgatttggtttgccggatggtcacaagcatgggtcttctcctctcaatggtatttttaaacagtatagcatagggatcaaaggatttccatcatcggatgcaataaaatccctttggcccattgcaaatcgcagcgtcagcgagtaaactaaaggcagcggggttttgccccaaaacgccggaccgtgggccggagaaagaggaaaaaatatgctgaaactgctgaaaaactgcgatgtatacgctcccaaacacctggggatgcgggatatcctgctggccggagacaagatcatgaaggtggccgaaaagattgaaggctacgagggcctggacggggtggaggtcatggatctccatggcgccattgtcacccccggcctcatcgacatccatgtccatgtgacagggggcggcggggaacagggctaccatagccgcaccccggagctcaacctgagcgagctgatccgcagcggcgtcaccactgtgctgggcctgctgggtaccgacggcacctcccgcagcctggaaaacctgttgggcaaggtcactgctttggagaccgaaggcatcagcacctatatgcttaccggttcctatcagtatcccaccgtcacactcaccggcagtgtgctgcgggatatcatgctcatcgataagatcatcggtgccaagctggccatgagcgatcaccgcagctccaccatcaccgatgacgaaatgacccgcctggccagtgatgtaaacatgggtggtatgctcagcggcaaggccgggctgctcaccatccacaccggcgtgcgggaagggatgctggatcccatcttccgggcgctggaaaaatccgatgtgcctatcgaaaccttcctgcccactcatgtgggacggaattacaagctgctggatgaggccatcaaactgtccaaaatgggaggcaactttgacctgacagcccacggttcgttgaaggaagatggagagagcgccgctgatatggtggcctactgcatcaaaaagggcgtggatctggatcatctgtccatgtcctccgacggcaacggcagccagccccgttttgacgaaaatggccggtgcatcggcctgacctatgtgagcccggcggtgctgctgtatgagctgcgccggggcgtgctggagctggatgtgcccctggaggagatgctgcgcatcttcaccacttctcccgctctgcgtctgggaaaagaaggagtcaagggctgtatccaggaaggggccgacgccgatctgttggtgctggataaggagctgaatatttcctcggtgattgccaagggcaaactggcaatgtgcgagggcaaggtgctgctgaagggtacctttgaggaataagcagaaattacgaagggcctgctgcaatttgcagcaggcccttttgtttttcagagaaagaggagaaaaatggatggacggatgcgaaaaaggatggtatgctaaacatagggtaagtgagccatttggatacacactgagttaattttttcaaaaggcaggagggatggatatgaagaaaaacatcgtgcaaaaggccggatggatctttgtgggaagctttgcagggcttcacttgctgcaaggccttgcggaaatggctcggcggcagatggtcctcagcggctcggcagaagggggagatattgtgtatcagaccctggagcagatcagcacctttctgcgttattttctggcggggcccagcctgaaagccgatccgctgacccctaaaatatggccccgggacatcggcggcgccgctctcatcggtttgtttgtggtggctgtgacggtatggctgctggcatattacggctggaagcggacctatctttattggggagcagccctggctctttccatcgctctttgctttgcgcttgatctgatggcaggaccgggaatctctgaccccgctattggcagcaaaaacctggcagaagtccccttgcggtgcgccggatatgtgattttttatcagatccccgcctggcttctgtatgaaggaagccggtatctcgctcggaacatccagaaagaacgggaaggataaagggagggatcaccatgaaaggcaagaaaagagccataggcggctggatttttgcgtttgtgtttgtggcagtgcagcttttgtactgtgcactggatctttggcggaaagtgagtatgcgtacgccgccctttgactatgtcgaaacgcccatgggggagctgatcgaccaggtgatcgcctttctccgccactttctggcagggcctagcctggtggcttccccctcggaaacattggtgccccgggagatcggcggcgcctgtctgatcggtttgtttgtggtggcggcaagcgtatggctgctcagccggtatggctggaagcagacctgtctctattggggtgcagccctggccctcagtttgctgctgtgcgacatcatggggaatgtggtggccagccggttttcctctccggtgatcttttcgggggagagcatagaggtggcccgccgcagcgccgggtatgtgctgctgtatcagatccccgcccggcttttgtataccggcctgcgcaagatttttcgggatgccggggagcgggaaaaaacagaataagaaaaaagcaccccaacgggtgctttgagcatgtcgaaaaagtggcttttaccactttttcgagtttttgcaagggcctgcatgcagccgattggccgcttctggcggtcaatcggccacacttgccccttgagaggtgcaaaaaccgacgcacaggtctggggtttgcgaattgatgagggggaaagcaaacctctttcctcgggctacatcggtttatcgacaggctgaaataaagcaccctaacgggtgctttatttcaggcccaaggccggtttttacttgcgcagttccttgacggctttttcgatccgctggcaggcgtcctccacaaaggcacgggggcaggccatgttcagacggcggaagcaggtgccggtctggccgaaccaggagcccatattggcggcaatgcccaccttttcggcaaaccatttgcccagctcttcctcggtcatgcccaggccgcggcaatccagccacatcagataggtggcttcgttcatgcgtactttcaactcggggcagtgctcgtggataaagtccacaaagtactggcagttgccccgcagcacatcgatcaactcatccagccactgctcgccttcgttgtaggcggcgatggtggcggggccggcgaagatgttggcgctggcatgggccttggccacctgagcctggaacttcttccgcacttcctcgttggcgatcaggatgttggaaccctggatgccggccaggttgaaggtcttgctgggggctgtgcagatgatgcagttcatcttggcgtgctcagacacattgccgtagacgatgtgctcgccggagaagaccagatcgttgtggatttcgtcggcgatgacgaaaatgttgtgcttttcgcagaaagcgtccagtttttccagttcttctcttgtccacacacggccgccggggttgtggggggagcacagcagcatggcccgggtcttgggggtgactgctttttccatggcatcccagtccatggtgtaatagccgtcctcgtcatggaggggcacatccagcagcacacggccttcatcggtggtggcgccaaagaaggggccgtacaccggagagcacatcagcacttcgtcgccgggctcggtgacggagttgactgccatatgcagagcggtgacgatgccgggagtgaaggtaatccactccttctggatctcatagttgtgacgacgcttcatccagccgatgacggcttcataatattcatcggtcaaaaagtcatagccaaagaccagattctgcactctcttctgcagagcggccacaatgggaggggccacagcgaaatccatatcggcgatccacatgggcagcaggttttctgccacaccgcagccatagagggcatcggccttatcccatttgatgcagccctgatttttacgatgaggagcgttcttaaaatcgtacatttctatcccttccttgtcttttatagagattttgaatatgtgtttagcatctaaagatagaatatcattccaccatcaaaagtcaatctttttttgcaggagataggggagaaaaaggccctatcccagcgaaaactcacaggtacctttttcgcagatcggggggaaggctagggtaaaaatccgcttggaaaaagtcccgcagatcggtgttccacaagggccacagaaaggccaaaacatccacatcttcggtgaccatcgcctgcatcagggtgcgggccacattcatcattttccgctgctgcaaggtggcttcctgggcatattccatcaaaaggttttccagcaacatggaaagaacagtgggcagcagagcgtcctgcacaagagacagaccgtccaaaacataccggcgcaccgcgttgttttgatccagttccagcggaggaaattgctcctgctgcaaaagaaaggcatcggacgctttaccctgggtgagggcaattcgaaaaagttcaataaaatagcggaaaaatcgatcataatccgaggttttatagctgttttcgatctctgcactgtttggcatctggttttgtctccttgtattatagagtagtagttattagagcccctctccaagggctgtgctaca

SEQ ID NO: 4473 - DNA, 8055 bp, Unknown
  16S sequences of unknown bacteria
attatgcgctatgtgaagacggatatcatgcttttatggtgtaagattctggtatcctgtgtaccggcggcgatcgtcggaattctgtttaatgatttttttgaggcactgttttataattacattacggtagcgatcatgctgattctgttcggcgttttgtttatcattgtagagactgtgcataaggggaaaccgtcgaagatcaattctttgtcggagctgtcatttcagaccgcattcgtgattgggcttttccagctgatcgcagcgatctttccgggcacctcccgctccggtgcgaccatcgttggcgcgctgatgatcggtgtatccagaacagttgcggcagaatttacgttctttctcgcgattccggttatgtttggcgcaagccttttgaagctcgtaaaattcggcctggcatttacgtcgaccgagcttacaattctgctgatcggtatggtcacagcttttgtatcttctctgattatcatccggttcctgctcggatatatcaagaagcacgatttcaaggtgtttggatattaccggattattctgggtgtgctggtgcttgcatatttcttcttttcgtgatttgaacgcagagcgcttcgcgatctgcgttcatgagcaagtagcgaagctagtagggctcacgctaattagcgacctgcttcatttgtataaattcccatctactgcgttgtcgtcaatcgccgtagccaccgctacgcctcattccttcgccttgtagatgaaaatttatccagcatgaatcagattgttaattagcgtgagtcatactaggccctgtcagtagagctgcagggatggattgcgaatgtccactttacgcctgcaataaagtgaattatgcaaaatcagttttcaaacagactgcgagagggaagaggatggaaaatcaaaatcgtgtaattatagtgggggcgggagcatccggcctgatggcggcgattacagcggcccggaacggggcaagggtgacggtgctcgaagcgatggaacgtccgggaaagaagcttctgacgaccgggaacggacgatgtaacctgaccaatatggatccggagctgcccaaacggtatcacggagcagacgcatcatttgtacagccggtgttggaacagtttgatgcacaggaggtgcgcaattttttcggaaggcttggcctgcttaccattgagaaaaacgggtatgtttatccatatacaaatcaggcctcttcggtactggaggtgctgctggcagagctgcgcagatggaaggtaaagctgaagctgatggaaaaggtcgaagcgattacctgtgaggatcgtatctggaaggtgcggacaggcacgtggacctatgaggcagagcggctgattctcagctgcggatcaaagtgtgcgccgacaaccggttctgacggcagcggttatcggctggcgaaaatggcgggactgaagctcataccggtcgtccccgcgctggctccgctgctctgcaagggaaagacgcctgctctggcagccggtgtgcgaagtatggcagaggtatcgctgtggcagcgcaagaagcaggatatgagacctgacggagccgatgactggagatttgtcgcttcagaactgggagaagtgcagtggacgaaatacggaatttccggaattgcagtctttcagctgtcccggtatgtcgcggcggaaaaaggagctatgacatttcaggttacacttgatttgctgaaaccctgcctagaagagcagaaaatggagcgggcagtgctgcaggaaatgctctggaggcgtgccggacagcttccgtctgaacccgtcggaatgctgctgcgtgggattttgaatgaaaagctgattccgctgatgctgaatcaggcggaaatccgctcgaagctgcagtgccgggagctcacagaaaaagagctttgcacgcttctggatgtatgcagaagttatgcgctggtcgttgatggtacaaagtcctttgatatctgtcaggtatgtgcgggaggagtagatgttgcacagatttctcccaagacaatggaatgcaaatgcattccgggactgtatgtgaccggcgaactgctcgatgtagacggaccatgcgggggctataatctgcagtgggcatgggcaagcgggtatgcagcaggacgaagcgctgcttcggagagaaaagaatcagttaaattttagaaaaaacaaagaaaaaagacacaaattaatctggatttgaacacaattgcgacacattttcttcgtatcatgtcctcagcatgaatgcagaaaagcgttccccgctttcagtgcgcggagcgactgcgttcatgagcaaacatcagtaagaaaggatttggtacaagatgaaacgtaattatgtagcattacttctgggactggcacttaccgtttcttccatgggcgtatatgcaagcgagggtacgacagaggccgctaccgaaacgaccactgaggcaactactgaggctgccaccgcagaagcaagtaaagatgaaaacgcagatacagaggcgattgtcggacaggtgacaaaggtttctgcagattcaattaccataacaaagggtgttctcgctgcagacgatgaagagacagaggctgatacggagagcacaacagatgcggaagcaactaccgaagcagcatcagaggatacgaccgaagcagcagctgaggataattctgaggcggcaacagaagcagcatcctctcagacatctcttaccctgacactgacgaatgaatcactgacctacaattttgcagatgacgcgaagcttggtgagctggctcagacggagaatattgaggtgaaggcagcggacagttcttctgatacgtctgccacggaggcaactaccgaaaaagcaagcgaggcagtgtctgaggccgctaccgaagcagcatccgaagaggacacgacggaagctgcatccgaggatgcgaccgaaaccggcacagaagtagctaccgaagctgcatctgaggatgtgaccgaagagtctgtcgaggtttctgaggatggcaccatctccattactgcagatggcattatggagggcgacatcgtgtcaattcagctgaacagcgatggaacggttgcgagccttacaattcttgcatatggcaccggcacagttgttggcgaagcagatgaggatacagagatttctctgtatgaggattcgacagaagctgcagatgcctctgtggacactgaggctgcaacagaagcagtaaccgagtaacagagtaatagatacagacattttccctgaaagccagaaccggatcattccctcatatgatccggttctttctatataaaaataaagacagcctataatctgtttgcagatatccggtctgattctgagcccgtttacttcacaagataaaaaaagtgtgataaaatcgatttgctcaaaaaagaagaacaggagcaggtgacagatgaacataaaaaccataatacgaatcagtgagctgaagcttccgattacacatacggaagcggagcttgagaaagagatacagaagatcctcagactgaaaaagcagccgtttacttatacgtgtatgcgtcagtcggtggatgcacgcaaaaaaccggagctgttttatgtctataccgtcgatgtcgaaacggcgcaggcgacatcgattgtaaaacgccttcataatcgtaaaattacactgacagaaaaaaaggagtatgcatttccttacgaaaacgctgcagaagaaagagagagcgcccatccaccggttgtagcaggcagtggcccggcagggcttttctgcgcactgatgcttgcccgcgcaggactttgcccgattgtgctcgagcgtggagcggcagtcgagcagcgtgtgcaggacgtggagatgttctgggagaccggcgtgctcaatccaaattcaaatgtccagtttggggaaggcggcgcaggtaccttttcagatggaaagctgaataccctgatcaaggatccggatggaaaaattcattttgtactgaatgaatttgtaaaggcaggagcagatccttctatactatattattataaaccgcacatcgggacagatgtgctcgtatcggtcgtgcggcatatccgggaggagatcgaagctctgggcggcagattccggttcaagagctgcctgaccggaatccgtacacaggaatcgggtgcgcgctatcagctggaggtcaatggcggggagcagatgcaaacggatcatctggtgctggcgatcggccacagtgcacgggatacgtttgaaatgctgcaggcacttggcatgtcgatgcagccaaaggcattcgcggtcgggctccgtatggagcatccgcaggagcggatcaatgaggctatgtacggcatgccggtctgcgaacagcttggagcggccccttacaaggtgacgcataaatgtgcggatggccgtggtgtgtattctttttgtatgtgtccgggagggtacgtcgtcaatgcttcttctgagccgggacggctggcggtaaacggtatgagctacagcagccgcggaagccgtaatgcaaacagcgcgatcgttgtgactgtcacgccggaggattatgaggcaaaggatgcgctggacgggatgcgtttccagaggaatctggaagaagcggcatatcgctgcgcatccggaaagattccggtagagacatttggcgacttccgatccgggaaagagaaccaggagcagccctctggaaatgaggtgcagcctcaggtgaagggtggatatgcgtatgccaacgtacgccgaatcctgccggagtctctgaatctggcactgatcgagggaatcgaggcgtttgggcatcggattccgggctttgacgattccgaggcactgctgctcggtgttgagagccggacatcctcgccggtacggattttacgtgatgcttcctgtcaggcagagcagttcccgggcatttacccgtgcggcgagggggcaggctatgcaggcggaattacctcagctgcagttgacggaatacgggtggcggaagcagtgtgtgagcgtatctaaggcggacgtttcgtgcgcaggccacagaccagcccttcgagctatccgctgcatacgcagctcctgtctgtggctttatgggcgttccgcccatcccaagataccaatatagcccgcagcaaataaatttgccgcgtgctgtcttggtatcttgctgctatacgaaactggttatgaaaattttaagcttctgggtgtatactttggaaaaaatttatggtagaatatttcaatggttcattttcaaagaggagaattgtgccatctgggcgagcgagagcatgaaacataatgaaaaacgagagtaatgcagcaggaagcacgatgaagcatctgccaaaggaggaacgtccctatgagaaatgtctgatatggggagcggagcgtcttagtgatgcagagctgatcgctgtgattttacgaactggttccaaaggcgtatctgcactggagctgtcaagaaacgtactcgctcaggataaaaaagggcttcttggcatctaccacatgtcgatttctgatttacagaagatccgcggactcggaaaggtgaaggcgatacagcttaaatgtattgctgagctttcgaggcggatatcacgggcggggatttccgaatctatttcctttcatgacccggctgcggtcgcagaatattatatggaaacactgaggcatgaagaacaggaggtgcttgttcttacgatgctgaacagcaaggggaagctgataagggatactatcatttcgaggggaaccgttaatgcttctctgatttctccgcgcgaaattttcatcgaagccatccggcagcaggctgtcagcattctgctgctgcacaatcacccgagcggcgttcctgacccgagcagggatgacgttctgctgacagagcgggttaaaagggcaggtgcgatgcttggcatcgagctgctggaccatatcatcatcggggacaggcaggccgtcagcatgagggaacaggggttctggctgaatacagaaacgcagtgaggggaaaagaatgctgtttcagaaggtatgtgccgtggatcttggcacagatacgatcaaaatcaaagataaaaacggaaaaaactttttatacgataaaaatgtggtggcgcttcgcaatgaccgtgatattctggcggtcggcagcgctgcctatgaaatatacgaaaagaacccgaaaaatgtacaggtcgtctggccaatgacaaatggcgtgatcgccaatctgacggaggcggagatcgtgctttcgcatttgctgaaaagcttctccgggatactgcatcgggatgtaacgctctatattgccgtgccaagcgatatcacgcaggtagagaagcgagcctttttccaggtcatgcgcggtaagatcggtgcaggccggatccgactgatcgataaggggatcgcagacgcagtgagcgcagagctgccggtgctctcctcgcgcggacatatgatcgtgaatatcggcggtgatacgacagagatttctgtgattgcctccggtaagattattttatcgcagaccctgaagatcggcggaagaaggctggatgaggacatcagcacaatggtgcgccggaaattcaatctgagtatcggtcagaagagcgcagaagcattgaaaaataaccttgcatttatgatcaatggtccgcgtctggagcagaaggtgtttggtattcatacgctgtccggccttccgaagtcggatatgattccgtcgctggcggtgagtgtagcgatcattgacagcgtggatatgatcgttgaggcgatcagctccatattcaatcgggtaccgccacaattgatgaaggatatcacgcgtgagggtatttacctgagtggaggtgtctccatgatccagaatcttccggaatatatccgaaaggagcttggaattccgatccatcatattcaggatccgaagaacagtacggtgcggggactggtggaaatcatcaataataaggatctgcggcagtgtacctacacgctgaaggatctggcgggaatgagataaggcaggttgactatgaaaaaaaagacaaatgacaatttgaaaaacaaatatcttctgatcggacttagcgtattttgtgttgcactgattttgctgtccttttttgaaggggatgcggttgcaccggtcaggcaggtcagcggatttgtgattacaccgattcagaagggaatcaacgggtttggctcgtggctgtccggccttaccgataatttcgatgatgcggtgacgttgcgggcaaaaaatgaagaactgcaggcgaaggtggatacgcttaccgaggagaacagccagctggttcaggataaagaggaactgaccagactgcgtgagctgtacgatctggatcagcagtatacagactatgaaaaggtcggtgcacgtgtaattgcaaaagagtccggcaactggtttcaactgttcacgatcgataaagggagcaacgatggcattcagaaagatgcgaatgtcatttccggaggcggactggtcggaatcgtgacagaggttggcccgaactgggcagtcgtccggtcgattattgatgacaacagcaatgtcagcgcgatggtatcaacgacctccgaccagtgtatcattgccggggaccttcggctgattgacgagggctccctgaatctggtcaaactgaccgataccgacaataaggtacatgtcggtgataaggtcgtgacgtcctatatcagtgagaagttcctgccgggcatcctgatcggatatatcagcgagctgaacaatgattccaacaatctgacaaagtccggatatatcacaccggttgtcgatttccggcatctgcaggaggtgctcgtcattctggagttgaaaaattatgtgccgtccgattcggtgtcgcctgcatctgataca

SEQ ID NO: 4474 - DNA, 4009 bp, Unknown
  16S sequences of unknown bacteria
acctcggacagcgccgcccccagctgcagcagcgaaacgcccagatactgacccgaaccggcatagatggtcaggctcataaaaaaggaccagatgaaattatagccgatggcttccagcatcaggccgaaggcaatgccgatggccagatacccgatcagcaccggcaccgtgacgcggaaggccgcggcccaaacatggcggttcaaggttctcacacttcccggaaaaagattctgcacacaaggcgtattctttattgtaccgttttcccgccaaaatgcaagccccgatgcgcgaaaaagtgcgccggccaaaagcggaggcgccccagtccggggcgcctccgcttttggctttcagatgcctttgtattttttccgggtggccatgccgccgcggatgtggcgctgggccttgttcacgtccagtaccgcttttacctgatcgtacagcgcgcggttgaatttcggcagacgttcgctcagatctttatgaaccgtggatttgctgatgccgaatttctgagcggcggcgcggacggtggtccggttctctatgatgtattgagcgagcgtgacggcacgctcctcgatgtttcccttcaagcaacaacactccccgcctgtttctgctccaatctatgcagggccgggcgggaatatgtattgccaggcggcagcacgccccttttcttttggcagcgctcatgctatactgtgaaaaaatccccaacatcacagaaggaggcctttcttatggcacaaacaacctggaaacgctcggcctgcccttatgactgccccgacggctgcggcctgctggtggaaaccgacggaaaatgcgtctaccgtgtcaaaggcgatcctgaccatcccgtgacgcgcggcttcgtgtgccgcaaaatgcagcattacgagcgcaccgtccacagtccccggcgcattcccacgccgctgcgccgggtgggggagaaggggaaaggcgaattcgttcccatctcctgggaggaagccgtggatgaaatcaccacccgctggaaagccctgatcgccgcttacggcgccgaagtgatcctgccttattcctatgccggcaccgagcatcagattcaatacggctgcggcgaggcctttttcggccgtctgggagccagccggctggagcgcaccatctgtgccaaagccaaggacgcaggttttgaacagatcatcggcgccacgccggggcagaatccccgggatctgtcccactgcgactacattattatttggggcagcaacgtgacagccacctggatccacgcccactcggagatccttgcggccaaaaagaacggcgcccacgtggtgctgatcgacgtatatgccacgcccgccgcagctctggccgacgaagtgctgctggtgcgtccggggacggacgcttttctggccctggccatggatcggctgctgcagcaggaggggcggctggatcgcgcttttttggaccgacacaccctgggcgcagccgaatttcttgccacgctggccccgtatacattggaagcagccgagcagaccaccgccgtgccaaaagagacaatcgcctccgtggcccggggctttgccgcggcgcgctccccggtaatcctgttcggcgcaggcatgtcccgccacggcaacggcgccatgaccatccgctgcgtcaccaccctggcggcggtgacgggggctttcgccaagcccttcggcggcatcatcggcaacgcctccagcagcgcggcgtaccgggacgacctcattacccggcccgattttcagcagcgccgcgtgcgcagcatcaatatgggacagatcggttcggccctgacggagttgaacgacccgcccatcctgagcctgtatgtctacagctccaaccccgcctccatcgcccccaaccagagcgccgtactccggggcctgcggcgggaggacctgttcaccgtggtgcatgagcgtttcctcaccgacaccgccaaatatgctgatatcgtcctgccggcggacaccgccatggagcacggcgacctggccgcttcctacggcaacctctgcatccagaaaaccgacccggtgatcgcgcctctgggcgaaagcaaatccaactttgaaacgtttgccctgctgggccgggccatgggctttacggaggactatttccatcagaccaacgaagaactgaaagatgccgtcctggccgcccctaccccttggcgggagcgcctgagcgccggggcaaaggagcagtttgcccagggccgcgccgtgctgctgccccaggacgatccctgcgcttttgcaaccaagagcggcaagctggaattcctgcgcccggagctgccccatccgctgccctgttaccttccggatcccagcggcagctatccgctgcgcctggtggtggctccccatcaggccacgctgaactcctccttttccgaacgtgacgagttggtgaaagcccgcggccccatgcgcctgatcctgaacgcagccgacgccgcggaccgcggcatcaccgacggggcggtgatcgacgtatggaacgacctggcccatgtgcgcttctatgccgacgtgcgcagcaatgtcgcccccggcgccgtggtggccgagggggtgtacagcgcggaacagtccctgaacggcctgaccgtgaacgccctgctgagcgacgccctgaccgacggcggccgcgccgccacgctgtgcggcaacacggtggacgccgcgccggtgtgacaaaagcggccggttttcccgcgctgttcacagtttattgacacatttcccgggaaatacgctataatagccccaacaacatgctccagaaaggatcccatttccatgaaaaaatttctttccctcctgctgagcgccgctctggccgccctggcgctgaccggctgcggcacgccgcagggcgagccttcctccgccggcgaaacgcctcccatcaccggcacggcggcccatttgaatatcctgctgccgtacgccgccagctccgctgtggtggagcagcacagggatggcttcattgcttccctgcgccacgagctggccgaccggggctgggccgtggaggacatcaccctcagcgtggctcccaccgccgccgccagcggcaaggccctggacgacagcaccgcggatctggccattctgccagccagccagtacttcacctacagcgacgacgtggatctgctgatgaccgccacaaagcccggcgtcagcgtcaactccctcaacgccgccgactggaacggcagcgccgagcaccccacctataccgatgaggactgcccctacagccgcaccctgatctgcgccaccaattccgaaaccggccgcgccctggcccagtccgccaaaaacggcacgctgacctgggaagagctgtctgcggccaaatggatgtatgccaaagcttcctcctcttcggactttttctaccccgatctgtggctgagcgaacaattcgggaaaaccctcgaagatctgccgaacctgcaggccatggacggctacggcgcgctcttttccgaagcctctgccgaagaggcggacgtgattgtgattcccgcggacctgcgcatcgactatgccgaagcctggcagctcgctgccgatgacatcgattccaccggaaaaatgggctttggccacgaggacagcatcttcaatgaaatccaggttctgggcgttaccgcgcccatctggggcgacgtgatggtgctgcgcgccggcgaagaaccctttggcgacaccgacttccagtccgccctgctgggagccatggacgcgctggaaaaggacagcgacgcccgcgccatctgggaaagctgcggctacaccggcttcaccgcctccggcggcagccactacgacaacattcgggaccggaccgtgttcggcaccggggactgatacacagggcacatacagaaaacgggagtacggaatcatccgtactcccg

SEQ ID NO: 4475 - DNA, 19049 bp, Unknown
  16S sequences of unknown bacteria
tgtaaacgatagagccccggcgctgcggcgccggggctttgttctcccgaaaaaagattgacagaagggtggaacagatatataattaagctaacttatataaattaacttaacaaaaggggtgggcgtatgaatttgcgggacagcctcaatcagtattattacgatgaaatcgtgtgtgatctgcgcaggctggcgaagaatggcggaggtgagctttctttcaacagtattatgtatttggatgtgatttcctatcaggagcaaagcggcggctgcacagtgagccgcctggccaagacgttgcatatttccaattctgccgccacgatgaaggtaaacgagctgatgcacttgggactggtggagaaagtgcgcagtgaaacggaccgccgtgtggtctatctgcacctcagtccgctggctgctgcaggtgtgtgcgaaagcgatgcgccctatgagcgggcagtgcagaagattgaaacgcagtacagcgaggaagaaatcacgctgttttgccaaatgttacaggtgtttgccgacgaatatcaaaaggagaatcccatatgaacctatccacgcagctttttgcaactatgtctccgaaccggctgtttttgcgctgtgcgctgcccagtatgatcgccatggcggtgtcttcgctctataccgtggccgacggcatttttgtgggccgttttctgggagaggaagctttggcggcggtcaacctggtcatgccctttcttctcatcagttttgtgtttcccgatttgatcgcagtgggctcctctgtgcagattgccctgcgtttgggcgagaaaaaagaagaggaagccagccgcatttttaccgtgtgttcgttgctgattgtggttttatcgtgcctgatcggccttgccgggtttctgggcgcggaggccatgttgcagattttgggcgctgatgcggcagtagcggcgttgggcgcggaatatctgcgggtatacgcgctatttgctccctttatcatggttttttatgcggtggataactatctgcgtatctgcggccggcctcgctacagtatggtagtgacggtgattacttcacttctgaatgttgtgctggattaccttttcctgggcgttttcggctggggcatcgctgctgctgcgctggcgtcctgcctgtgcctgacgctgggcacggtgttgaattatgtgcctttcctgcgcgggaaactgcccttgcgctttgtgcgcggcggaatctccctgcggcttttaggcaatattttttataatggctcgtcggaatttttctccaacattgccggttcggttctgatggtagtgctcaacggcgtactgctgcgcatgggcggatcggcagcggtggcagccttttccattgtcctgtatgtagacagcgtggccaattcactgctgtttggtatgtccgattcgcttcagggcgccgtcagctattgctgtggtgcagggctgcgccagcggatttttgcgctggaaaagcgggtgtttttggtgggcgcgctggtggcggcgctggcctttctgctgatgcgtttcggcggcgaagcgttgctggcgctgtttctgggccacaacagtgaagcggtgggtgcgctggcgctgcgggctatggagctgttttcgcttacctatcttacctgttggtttaatgtggcgatcagcgcctttttcacagcggtcaatcgtccgggggcgtcccttatactgtctttcggaaatgcgctggtgttcccactgctggcgctggcagtattgccgcgcctgtggggcatcgacggggtatggctcacgccggcctgcggcgatttgttgactgcggtcgcggcagtggcgctgctgctgtatttctggcggcgaaaagaacggaagacggcactggaggaagtttgaggcgtgaattacgccttggaaactgcgcctgtccgtggtataatcggggcagaacagactgcagttgtgtgaagagggggctggcggatgatggaagaaaaatacattgcgcctaaagatgcagcggaaattctggttgtcaaaaaaacgacggtttatgatatgatcaaacagggacggctcaaagcggtgaaaatcggaaagcagttccgaatccgagaaagcgatgtactcgcgttggtgggcgattcaccgcaggatccgggtgctgccggacaggagagccttcttctgtgcggacaggatatgctgctggatcatctctgtgcccgtgtcaatgctgccgaagggtatcaggcggttagccggtcgtaccttggcagttacaacggcctgtttgccctatatcaggggcaggcaaacttcgctacggcccatttgtgggattgggaaaccgaccagtacaatctgccgtttgtacccaagatgctgccggggatggaagtgcaggtttatcacattgtgaaccggcccatcgggatttacaccgcaccgggtaatcccaagggcatcacctgtgtggaagactttgcacgggaagatgtgcgtatggtgaaccgggaaaagggcagcggtatccgggtgctgaccgacagcctgtttttgcgcgccggtctctcagctgcagagatcaacggctatgactgcatcgagcactcgcatatggcagcggctgccgctgtggcccggggagaggcggactgtgccgtgggcaacgagcgcagtgtgctcggttccagggaagtggatttcttaccgctgagatatgagcagtatgacctgattgtacctataagcgaactgggacggccggtggtgcagcgagtgctggaagtgctgcgttccgatgcgctgcgcatggaaaccgcggcgctgggaggctatgacgtgacggatatgggaaaacgtttgctttgacgcttgcatatttgtgttgtttctggtatagtgaaaaagaactcagcgcggggatactgcgggaaaggggcggccggtttggcttatacagaatttatcggaaccacagtgctggataccatcgggctggtgatccccagcgtagatgaacagttgcggacgcaggcggattatctcaaggaataccgcagtatcgggatcctcagttcccgcaccggtgcggctgggcagatcaatgctattgacgaggcggtcaagcgtacaaacaccgaagtgctgactatccagctgcccagggataccaagggatggggcggccacggaaactacattgtgctcggtgcagccaatgaagccgacgcccgggaggcagttgagattgcactggaatatactgagcgctattccggcgagttgtatatcagtggagaagggcatgtggagctgacctactccgcccatgccggcgaagttttgcagtggtattttggtgcaccggcggggcaggcgttcggctttgtggccggttcgccggcggcggtgggcctggtgatggcggatacggctgtgaaagccggtgatgtggaatttctgcgctttatggatgccgatcattacaccagccataccaacgaagtaattgtcgcgtttaccggcgacgccagcgcagtagagagcgctgtgcgttcggcccggacgattgggctggatttgctgcgaaaattgggcagcgaggccaagccggtgggcgttccgtatttggattaacaagcagttgttttctgcttggggagccaacaggtaaacaataataaacaactctcttgttcaactgaaacaagagagttgttttcattatgcggcaggagcagcggatgcagtttttgctctgtattgatctagtacggcctgtacttctggatcacctgggactaggaaagtgtcatatccttcgcccgagaaatcttgcagaacaaattcaccatcgattacttggaagatcaaatctaaccgggcaatgcaatgattttcttcgccgccgtgctgcacaatgggagtgctcttttcgccttcccagatccagtagagcggctcgatgatcgtgtagtggtcatctgcgccgatgacggcggaaatgccctcaatgtaggccagcgaatcatctacggcgagaccacagtgtgagagaatgatattgacgtcagttttcccttccaattctttcaggcagcgctcaactgtttcgtaggggtctgcaaatattttatcggtttcataggcacgatcagccggcttagtggaggttacgccgatgatgccgacctgtacaccgttaatgtccttgataatatatggttcaacgccatcaatatattctccgctttccttataagttacatttgcgcagattacaggagcttctgctgttgcgatgatcgcgttgatttgatcgtctcccgttgggattgttccgtcgtcatttgggattttgaaatcattgttaccgatgacgtgtgcgtcgtatcccatcaggttcagcatttccatttcggggatccctttcaggtcattgaattcgccacgaaggaaaatatctccgccttctagaacgagcaagttcttgtgtgtatcccgcgctcgttcaataatggtggcgtattggggaagagaatcgtcatagccatggatatcgtttgtagatacaatggataatgtccagaaatcaccttcttgcggaacagcttccgcattggccgaagtacatgcggtaaggataagagatagcgtggtcatcagtgcgagagcagcaagggaaatagtgcgttttgcattcatttgaaagcctcctcattctgtttgtttcgctttggattgtgctggagtcgcatgaactgatattttgatgacagtgcgttggatctctgttaaaaaagaacctcctttctgtagaataaaataattataatctgtagaggggataaacgctggtaaatatatgtttgatttatggaaaaatttaaaaaaataaaagaatagtgttgaagaaaaaatagataattgcacaaaatgtattttatatagagaaatatgtttctaaatagaggacgccagccaaggaaaaacgctccgccatttttatggcggagcgactgtgcttaaaatgattattcgtttttatcagtttcgctctcttccagactggacagatcaaaattcagcttggtgccacagccggggcagaccacttcgccggattccagaaccgaatcgtcaaaatagatctcatcgccgcagctggggcagacagaagcgtaacagtcctcttcatcctcgtcgaaatcgtcgtcctcatcgtcttcgtagaggatgctttccacatcgctgagatcatcactgactgcgtcgatttcctcgcccagttcagcctgttcggtctgcaaatcctccaactccagagcgacatcctgcaggatgtcggtcatcagggagatgagcttgccttctttgctctgatcggtgtcaatgttcaggccctcggccaggcctttcagataagcgactttttcagagattgtcataatgatatacccctttccttgtttgctgcgccgcagcgcaaaatcggttatgaatgagaaacaatgcgtgcagcatgggtcacacactgcacgcaaaggacttgaatggattattttgcacggcccagatactcgccggtgcgggtgtcgatctgaatcttgtcgccgatgttgatgaacagggggactttgatttcagcgccagtttccagcgtggcgggcttgagggtgttggtggcggtattgccggccaagccgggctcagtctgggtcacttccagatccatgaagttgggcacttccacgctgaacacgttgcctttgtggctgagcaacttgcagggggtgttctcggtgatgaacttgaaggagtctcccagtgcgtccttgttcaggggaaccatgtcaaaagtctccattcaaacttcttgccgtttctgaaatcgcctgcagtaatagtagccataatcaaaatcctcccaaatcgtccaaagacagctttggacttgtagaattacataataaagtaagtatattgtatcgcatggagagggatttggcaagtccttttttcaggggaaaagagcctcagcggcggcgtggcgcttccgttgctgtgccaggggattccctgtcccgcagaagcagcagatcttttggtgcaatggttacggaaatgggatcgccgggtgtcggggcgagtgcagcccagtcggctttttccagctccatttctaaaatgggatattgggcatcctgcgctgcggcacaagggcgcagcagaacgatggtggaaaaaacgtcgtcgatcacctgctgcacggtgcaggcaaacgtattttccccgctgttttgaccggcggggcggacatagtgacggcggataccgagcagattggtgtcagagggaatttctgcagcgcagtgcagacgaatgccccagtccgttacttccagctcccggctgccgcagggcgtgcagcgggcgtagtttttacagcccgacagcagtgccgcggcacgggtggcggggcgctcaaacagatcctgcaccgtctgcaccggctctgaggtaccatgttccaaaacgcacacgcgctgagcgaggcggtatacttcgtcgcggctgtgggacaccagcagtgtggtgccgggaaaagcgcccagcatttcttttacctccagttccatttcccagcgcagagaactgtccagtgcggaaaacggctcatccagcatcagaatgcgcggctgaccgattaaaatgcgggccagggccacacgctgttgctggccgccggaaagagtgcggggaagatggtgttccaggccgtccagacgaaatttggaaaccgattgccgggccaatgccagtttttctttctgcggcaatttttcgcgtacgccggcagcgatattttcttccacggtcatattgtgaaacagcgcatagttttgaaacagcagtccaacccggcgctgctgaggcggcagattgatgttccgttccgagtcaaaaaaggtcacgccatccacagtgatgcgaccccggtcgggacgcacaataccggcgatgcagcgcagcgtcatgcttttgccgcagccgctgccgcccagaatggccaatacttcatttccgccggaaaaagatacgttcagctggaaggaaccgaaattcttctcaatggttgtttcgatcgacatgtttacttcccctttgttctcttaccagcggtggacatttttcatccccatgcctgagatcagattcatagccagcaaaatgacgaaagcaatggccagcataatcagcacccagataccggcggtgagataatccccattgctgatgaccaaggcgattcgctgagaaatggtgccggttttgtgggcgatgttgcccgccagcatggaggtggcgccgtattcgcccagggcgcgggcaaaagtgaggatcgtgcccgaggcgatgccgggaccggcttcggggatgattacacgccagaagatggcccgttcgctcatgcccagtgtgcgccctgcgtagatgaggtccacatctacctgttcaaaggcggcacgggcgttgcggtacatcagcggcagggcgatgaccgaagcggcaatcacacagcccagccaagtctggacgattttaaggtcaaatgtaccatagagccaggcgccgaacgggcgcttcagggagaatagcagcagcaggaaaaagccggccacggtgggggctaccaccatgggcagcgtcaggataccgtcgagaacggctttggtttttggccccagccgaacgacctgccgggccagccagatgcccaggaaaaaacagatgattgtggctacgattccggttttcagggaaatccacaggggactccagtcaaaggcctgcagaatggatcgcagttcctccatacatatgccctccttttttctgcaccgataaaatgcccgccgctgaaacggcgggcattttgaacaggagcattgggaattggtgtgcgtatgccctcaggcattgacaatgaagcagtggttctggaaaatttcctggacggcgggcgtctgcagaaacgcgagaaaatcttctgtggcggccaattcctcttcatcggcttcggggttggcaatttggcagaccggatagacaattgggccagtcaaggtaccgtcgtcctgcgccagaatggtcagcgcgtcctggaaatcataatagtcggaataatagatggtgccgacttcgttggagccttcggccacggcttgagcggccacggacacattggcgcattcgttgatctccacaccgcccagcgctgcggatacttcgtcggaagtgtaagcggaattatcgtcggtgtccggcagcaggcccagagatacgaaagcttcgcgggagtatttgcccacagggacagaaccgtcgcacaaagccatattggaagcattggacaagtcctcccagccggtgacggcagtgccgctgtcttttccggtgaccaggcacagttcgttctgcagcaggtttactgtggtgccgtccacaaccaggccgtctatttcatccagctgcgtgacctgggatttgccggcggagaagaaaatatccacaccgtggccggcggcctcttcgatctcctgcatcagcttgccggaagaaccggagttgatggaaatagtcacattgggctgtgtttcattgtacaagggaacgatttcctcaaaagagctgaccagagaagctgcgatgttcacataaacggtggtattcaacgttccgtcagattcgatgtttgcagtgctggaaggatcggtcggggcgctgccgtttccacagcctgctaatagaccgcccatcagggcgctgcaacataacattgccagaaattttttcatcttttccctcctataaaaccaaaaaatctgagctgttttgttaggatttatttggttttgttttatggtggttttattatactgaaagagacgagaaaaggcaatctttttcccgcaatcattcggacttttgtttgtgtcataggaattctttgcaaaaaaagcccggcggcacaaacctgcaggtttgtgccgccggaagcggatggttgtttattcggacgaaggcgcgcacagcgcatccagaacggcttgataactttcgtcatctgtgacagaggcgacattcaaaatgacgaagttggtgttgagcatactggtgatggtaggactgcaaactgcctgatctccggcccaaactgtgattttggattgctctttggccagctctcgggtggcgttgcggaactgctttttaccctcgtcgctcagaacgagggcataggcatagggactgctggttccagtatcgtaatgatcgctggccatgatcccttggatggtagttccatccagtaatgcttcgccctccggatctgtgcccacgcgtacgctcacatcctctgccaggggcagcagctccgccgtggcgctggtagtggtgtctacattgctgttgccgcagccggagagcaatgctgtcagagaaaaggcggttgccatataagcaatgattttgcgtttcatgcaattcgctcctttatgttgcttgtttttctgttgccggttcgatcaatgcctgcacgatatagccgcccatcatcaagcctgcgcaggaagggagccaggcgcagctggccggcgtactgcgccgtcccggatcgttatcgaccagcggtgcgggtttgatggggacctccggactgaacagcactttggtgtgctcaatgccccggacgcgcagctcccgccgcatgacgcgggccaaatgacagccttcggttttggaaaggtctgtgatacgcagctgaaaggggtccactttattccctgtgcccatggctgagagaatggggacattacgctccagcgccgtgcagatcaaatccagcttgcatttcaccaggtcaatgcagtcggcaatgtagtcataatgccgggaaaaacacaattcacgggtgctgtcttcgtatttcacaggcagagtgtgtacgatgcaatccggggagatagcgtgtacccgttccgctgcggcatccactttggcccggcccactgtttcatgggtggcgatgatctggcggttgatattggaacgattgacccggtcgctgtctatcagggtcagctcgcccacaccggatcgggccaaaacttcggtcacatagccgcccacgccgccgatgccgaatacggccacatggctgtgctgaagccgctcgatggcggcgcggcccagcagcatttccgtccggatcaattcttctttcatggtgcgtcctcctttcacaaaacgccggctttggaatccaaagccggcgtttttttctgcattcagcccacggccttcaggccgaaagtgtgtaccttggcgttggcgccatcatagatgctgtcctgccagtcgctgtacaggccattgatgcagcgcacttcccagtagggcagattttcaccctggaaatacatcacatgataaccgtacgtggtttccacaatgccggtgtcgccgggattgcggttggcatcgaaacaccagttttcaaaggcatctaccatctgtcccttgtaaacctgggtgtacaggccgccttcgctggcattggaatcactggagtattctttggccagttcaccgaacgcgtcggcagtgtgcgcgccggccaggtatttgttcagaacgtcctgagctttttccttggcggcggcattgttggtctctgtttcggcgtcgtagccttcgtcgtctgcgctcaaggtgtttttctctggtgcgatcagaatgtggcgcacatcaaccgtgttgtaatcggggcggtaacgctcgcccatgacaaccacataccagcaattgtttgcttcgtccttcaccacgctggcctcgccgttggtacggctttcgtcgaacacccagtcgttaaaggcataggaactgtaggaagaataggaagcgtcggttttggcgctgtagtagttgctgccaaactcatcgccgatatcggagagtttttcgccggagttcacgcgatccaggaacgcattggcagtttccttggctgcctccatggcctgcttggtttgggcgtcggtatattcgggcgtttcgtcggccgatccctcggtggtgccttcgatgccggtgtaatcggcgttgacggtcagcacttcgtagttggccagatcgatgtcctgcttgtgctcgtcgtaatatgtgctgatttcttcatcgctgtattcgtggttgttctggtagtcgctggcgtaatccgaagaaacgaacaccatggtcaggtgtttcataaagatctcgtcggtcattttggcgccgtactgcgtctggagatattgctcacgggtgatgctgttgctctggcagtattcgtcaatggaagcggagtaatcgtcgatctgctgctgcagttcgtcgctgatctcatagccgttgtccatggcttcgtggtacatggaggcgacctgtgtcagggcggtgactgcctcgctgcgcagataatccgcccagctctggtcttcgctgtactgctgggcgtccaggctctggctggcatccacacccagataggagaaataggcgctgtactgattcagtacagtggcatagtaatagtccaagtccgtggcgctgaatttctcgccatccaccgtgacggcagtcaggcctttgcggatgtcctggttgctgtacaaaaagcaaagcacgaaagcaaccagcagggcaatcacaacgatggcacacttgatgtaaaagttgcggtcctgtttttcatcttttttggtgcgcagttcctgtgtgttcttggtaatcacagacgtaccgcgcgtgttttttttatcgctcatttgtttcattcctctcaatccgagctgcgcagaaaccctttctgcacatataaataccgctatattataatagaagccgacctgtttcgcaagggtaaaatcataaacaaactggaaacaatcactattgcaggaaaagagcagccgcagggaaagaaaattcctttccctgcggctgcgtacccggtggtgtttatgccaggctttcccggaaaatatggaggatatcctcccgacaaagaggcttgtaaccgcctgggagcacaacagtaccatcggccaggccttccagcattccctcggttacgcccaggtcggagagtttcatgaccaggcccagctcctgcatccatgcttccatagcggccaggccggcttctgcgacttcccggtcgcttttgccctccggcgccacgtcccatacgttgacagcaaaacgcttgaacttggcaaggccgtacggcaggatgtggcggtaataaggcagtgatacggcggagagcgtcatgccgtgtgtggcgttggtgtagccgcccacggcctgccccagcatatgcaccatccagtcggtgcttttgccgcgggagatcagggtgttcagcgcccaggtggcggtccacatgatgttgctgcgggcctcatagttctggggatcgcggttgacgatgcggctggcgtgcagcaacgagcgcatcaggccttcgctgagatagtcgctggtgctgtcgtcttcgccggagaagtactgttcgcagatatggttgaaaatatcgtaaatgccggctgccatctggtcgtggggcagcgttagggtataggtgggatccaggatggaaaaacggggcatcacatcttcgctggcgaatacatggccaattttctgatgggtttcggtgttggtgatgactgcgccggcgttcatttctgagccagtgcccgccatagtcagtacacagccgaccggtacaatgggacaggtcggctcttcaaagcgcacgaaatacgtttcccaagggtcgtcggggcagtgcacggatacggctaccgccttggcgtaatcgcatacggagccgccgcccacggccagaagcagatcggtattatgatctcgggcaattgccacaccttcgcgcagcttgtccagagtggggttgggcatgacgccggcgatttctgccaccgttttaccgctgcggcggagcagatccagcacggcatcgtagataccgtttttttggatggagccttgcccgtaaatcagcgtaacattggggccgtatttcggcagttcccggctcagattatccagggaagcagagccgaaatagagttttgtagggttacagtatgtaaaattaccaaacataaatacaatcatctcctttttcttcaaagaaaataatttgtttgcgggagtcggtacctgacggtgcgttcaggatgccagagcgtcaggcagtttgccgtttcgtttggaaaacagcggggtcaacttctccggtttgtggtaggcgctgtttggtgctgccctcagacacaatgtccgctgactggcattgcgtcgatactgctccataagaaagtcggccttttcggcatttgctttaagttcttcataagtctaagccctggagaaaatacttctttcaggattgggatggggacgttacacccgacaacccatttcataagccgttttcagcgctggatggccggtgatgtctccgggcccgtctacgccgccggcgaatacggtgccggccaggcgcgctttttcaaaacagtcgatccagccggtcagaccgttgacggcccgttccggtacagtactgccgtcctctgctgctgtggtcagcatatagatgtctcgaaaggcgtagtccgaggaatacaacgggttggcccgatccagcagtgttttcatttggccgctcatttcatagtagtaaatggggctggcaaaagcgatcacatccgcctggcgcatttgttctgcgatggcgaccgcatcgtcccggatcacacacacatgcgtgttcaaacaggccaggcatccccggcaaaaagcgatcgtttttccgtttaatgaaacccgtttcacatggttcccagcgctttgtgccccggcggcaaatgcgtctgccaatgcttcggaattgcttttttcgcgcaggctggaaccaatcaccagtacttttttcggcatcttttgatcctcctgatatggatttgacaaaggaatttctcctttggtacaatcagcatatatcctgaacctgacttcaggtcaagaacttttttcaaaaaatatcaagaaagtagggaaggcattatgcgctataccatcggacaggtgtcggcacagtttggtttgcctgtgtccacgctgcgctattacgacaggcagggcttgtttccgcatatgcagcgcgtttctggggtccgtaagttcggagaacaggagctggaggctcttcgggtaatcgaatgtctgaagaaatcgggattggagatcaaagatatccggcgttttatggaatggtgcgcgcaggggaacgacacttatccgcagcgcttcgcattgtttcagaagcagcgcgcggcagcagaggcagagatcgcacgcatggagcgggtgctggatatgctcaagttcaaatgctggtactatgagcaggcgatccgggacggcggcgaggaacgcctggctgccatgcggccggaagatatgccgccggatatccgggcggcttatgagaatacgcatcgccagacggaggtttcagtatcctgaccggcataaaaaaagaacgtccgcgcccaacattggggacgcggacgttttcggcggcataaaagaatccccgcatggccgtgtggacccgttataaacctgcaccaaaggtccaggtgggttgcctacagctttcttcactgctcccagcttccgcccgcagaaaacaggcgggaggtctgcaaaacagatcactgatccggcatcccgtataacgaaatgtgggtttatagaaagcccatcacgcaccacgcagggattggtattaccatagcacgcgcagggcgtgccggcaatcgaattcagtcgcttgcagggaaaaccccgcaggcttattcttcgtcgtcatcatcggcgaacaactgatcggaaaaaagctgataaatttcgttcagttcttcctcgctgtccagagtggagagcagttcttcaccgttttctacgatggttttcagaatcaccagaccgtagtcggcatcatcttcgtcggcatcttcttccacggcggggaagaatgcggtgtaggtcaggccgttgtgttcgagcgtatccacatactcaagcaccagttcgttgccgtcttcgtcggtcacggtcagaaaatcggggccaaattcttcgctcatcggcggcatcctcctttggaagatcgaaaaattcaagatttacttctggtttatatcctgtatggatattgtactgttttggaaacgaaaaagcaagagggaaatttccttgctgctgcaaagagtgtttttgtataaaaggcatttgacttccatatatggatagtattgacaggctatggtatactggttctaatggcgtattttcagtatgtgccaaaattcaaaaattttaccgatatcaagcaaaaggagggttttctgcatgaaaggacaacagcgcccgcctcgcagagcggcgtcaggcagggaccatcgaaattatacacagcatccccggcaaagccaggggaagaaaggcggcaccggattcattctcaagacgctggtgctgatcgtgctttgcacgggtgtgatctttacaggaatttttgctgtgtatgtggccacctgcgtgattcccaatgcccatgtggatgtttctgaaatttccatggatcaaagttctgtgattttttatgagaacagcgagggagaatgggaagagctggaaacgctgcatggcggaaagaacagtatttgggccgattatgaaacgatgccaaagtacttgtcctatgctgctgtggctattgaggacaagcgtttttattcccaccacggcgtggactggccccgcacggccaaagcggtgatcaatcttttcacccacgcagagtctactttcggcggcagtacgctgacccagcagacgatcaaaaacatcaccggcgataaggaaggcacggtcaagcgcaagatcacggaaattttccgcgcgctggattttgagaagacgcattccaaggaagatattttggagctgtatctgaataatatctacctgggccacagctgctacggtgtgaaaaccgccgcgcagacctatttcggcaaggatgtgtccgaactgaccattgcagaatgcgcggacttgatcggcattacaaacaatccttcgctttacgacccttataatacggaaaaaaccctgcagaacaatctgaaccgcaaagataccattctgcaagaaatgtatacgcagggatatatcacggaagccgagtacaacgaggccaaagcacaggagttggtgttcaccaccggcgaagacagcgaagatgattcgcagtactactcctggtttgtggatcaggtcatctccgatgtaatcaacgatctgcaggaagaaaagggctacagtgaggctaccgccacgcagatggtctattacggcggactgaatatttactgtacgcagaagatggacgtgcagaaatgtgtggacgaagtctataataaccgggaaaacctgccttattcttcgaaaggttatgatatgcagtcggccattacggtcattgatccctacaccggcaatgtggtggctatggccggtgccatcggcgaaaagaccggaagccgtctgtttaactatgccacggctcgtcggcagtgcggcagtgcgatcaagcccatttcggtgtatgcccctgcgctggataaaggtgtgatcacccccgcctccgtgatcgacgatgcgccggtgcgtgcgttgggcggaaaggcatggccggtcaactcgcactcgtattttgacggtctggtgagcgtggacgaagccattgccgagtcgctgaacacctgcgctgtgcgtgtggtggaagagctgggcgtgaaggaatcctacaattatatgaccgacaagctgggctttactacgctggtatcggataccgacaatcccaagcaaaacgacatcaactcggcatccatgggcctgggcggcctgacccgcggcgtcagcactgtggaaatggcggcggcttatgcggcgtttgtcaaccagggcgtgtacaacgaaccgcgcacctacagtaaggtaacggaccaggacggcaaaacggtgatcgacaatacgggcgattcctgggtggccatgaaggagacgaccgcctatttcatgaacaaatacctgcgccaggtggttaccagcggcactggcggcagcgccggtttctcaggcatgaccgtcgccggtaaaaccggtaccacgaccgataactacgaccgctattttgtggggtatacgccttattatgtagcggcggtttggaccggctacgaggtcaacgtcaaaatcaatgcctcgggcaacccatcggcaaagcttttccgccaggtgatgagcaagatccatgccaatcttccgaataagagctttttctcggtggacggcggattgacatcggtaaaggtctgtatggactgcggcaatctggcttccgacctgtgtgcacaggacatccgcggcagcagggtgaaaacggtggaggtggcctccggaacggcgcctacggcggtgtgtacctgtcatgtggctgttgactggtgtgcagaaggggaagcgattgcgaccgaattctgtccggcggatcaagtggtgcagaagtctgcggtagactacacccgttccggtgtggcggcttcggttgggtgccgtgacgaaagctcacatctggctgcgctgcaggcgaaaccctgccaggtgcatacttcggccagtacggaagaacccacggatccagttgatccgaatgatccgaacgccatagatcccagcgtgccggtggatccgaacgtaccggtggatccgggaacctcggatcccgacccgattgaaccggatcccgatccagatgcgccggcatgacggcattccgtgaaatgtccccccggacggcagctgccgtccggggggacattgtttgttgtttagtccaaaagaagtgtgatcttgcgcccatctgcatcgatcaaaccgttttgacgcatgtttttcatttcccgcatcatagcgctgcggtcggaacagatatagtctgccaaggcgctgatggagaaaggaagatcaaaggtgttggaaccgccgcgcgtagactgaagggagaaatagcacaggagcttgtcccggatggtgcggcggctgaggacttcgatgcgttcactcagcgccatggatttgcgggacatcagacgaaacacgttttccagcagggcggtatggtgcgcgcagctgttcccgcagggatgcaggatgtgactatattcaaagaacaaaatggaagcggctttgttgcacaccacggtgatgctgtcctcgctcagaccggaaaaggccaaggcttcgccgaacatttcgccgctttccatggtttccaggatggtgcgcacgccgtaaacgtcgatacggatcagagaagcgctgccgcttttcaggatgcccaccagagtggaatgctggttgtattcgcagatcacatctccggcattgtaatgacgttcgcgggcgccgaagcactccatcatatcatggcagcagctgctgctgattccctgaagtatatctttgtatgaatcctccatggcgggagcctccttttttgttgataaaaaagatacttttatttgaaattgctcataattattgtgttttatagatttttaagtatttaattcaaaaaatttacaacgatattacaacaaaagaaagaaccttatataacgacttataacaatatctatttctctaaatattttatgcaaaatattaaaaaaagaatgacttcccattttttgatgatattataactttataaagataaatacaaattagaat

SEQ ID NO: 4476 - DNA, 3021 bp, Unknown
  16S sequences of unknown bacteria
gccggtggagctgctcgccggttacataggcgccggcgttcatgaaaaagggggactttcgcccgcttttcaaggtgaacttaccaaatttgaggacgtcgctttccaccatgaagtcgatgaattcccgcttgtactcttccacgtcgcgctcctgtctgcgttgggtaccgttgattttctcatgatacccgctcggaagcgtgcgacgtgtggcagtgccacacatcccgagagaattgcgtcggaagcgtggcagtgccacacatcgcacgtgatatgcacgagaagagtggcagtgccacatatctcgcgtttgcagcacgggaaacgtggcagtgccacacatcccacgtgatatgcacgagaaccgtggcagtgccacacatccggcgctggcggggcgcacgatgcgcgggaaccgtggcagtgccacacagaaaaacaggagcagctcatcgatttgttgtgattgcaacgcgaaacgttccgaactagccttacaacaaaaccaacgagataactgctgtcgaagggggcagatatgtgggacgtatcgcttggctatgagtacggcctcgatgagaagcaggcgctgcccgaggagctgacccaggtcgtgcactcctcgttcgagcccgtcgcgcacgccgtcgcccacgacgtgcccgtgtacctgtacgggccggcgggcagcggcaagaacgtgctcgtcgagcaggtcgcgcgtatgctcgacctcgatttccacttcatgggctgcgtcaccgacgagttcaagctcgcgggcttcgtcgatgccgcgggcacctaccacgagaccgagttctaccgcgccttcaaatacggcggaatcttcttcctggacgagttcgacgcgtcggacccgacggtcgccatcgcgctcaacggggccatcgccaaccgctacttcgcgtttccggaagagacggtgcacgcgcaccccgactttcgcgtcgtcgccgcgggcaacacgctcggcacgggccgcgatgcggtctacaccgggcgcatgcagctcgacgccgcctcgctcaaccgcttcgccacgattcccgtcggctacgattccgccatcgactcgtattgcgcgaagggcgacggaaagctcatcgccttcatcaaccagtaccgtcaggcggcagaggcgggcatcccgtcggtcgcgtcgtatcgcaacatcaagatgatcaaggtgtacgagccggtcatgctcaaggagcaggtcctcatgctcgcgctcaccaaggacctcggcgccgacgacatcaacgcgctcatcggcacggggcgcttcatcggcgacaatccctggctcgatgcgctcgagaacatcccgaacatgctctagaagaatcgcgcgaggtggtgcgccatggagtcgatcagagaccgagaactcaacatcgtgggggagcgcttctcctccttcctcgaagcgtaccgggtatgtgacgggcgctcgctcaatcgcgcgtttgccgagcgcggggacggcagcgcgctcgcgctgttctgcgccgacagcgagtcgtgcttctcgccgtcggatacgcgcacggcgctcctgtacggcgacgggcgctaccatgagcggttcctcgccgcatccgagcaggtcggcaaggcgctgaaggaccgctacgagtggattccgagcgacgtgttctcaaccgatgtatacggccagcacgtcatcgtggagcgctatgcggcggggcatcccaaggcgttttcgcgcaagcgcatccagcctcgacgccgccgcagcgtgaacattttctacgatatcgcctgcgccgcgtcgacgccggtcaaccagcgcatcgagagcgggtctatcgtgctcgcggtggcagacgcgctcgacaagatgggctacgaggtggcgctgacgctttccattgccaagttcggcggcaactcgatggcagacgatccgacgctgctcatggaggtggcgcttaagaactacggcgagccactcaacccgaagcgccttgagttcgcgctcgccggaaagccggtactgttccacctgggagcgctgtgggcgcatcgcttccccggcgcgccctccgattacaacggcaccgagggctacccgctctcgtacgaccgcaaccgagtcaagaagatgcgcgcgtacgccgagaagaaccacggcgtgtacctctccgaggacatcgtcgagttgcagctcgggctcgacccgacgaaggtgctcgagcgcgtgctcgaggatatgggcgaggaggacgtgctcgaagcgcacgtgcgcaagacccgcacgctcgacgcggcggtgaatcccgagcagggcagattgttcggaggaagtgaaggcaccggtcagggcacgggagacgggcggggcgacatccccacgcaggagaactctgaggacgggcagccagacgattctgctggagacggagccccgggcgcgtcgcccgaccagcgacaggttccccgtgcacccggatttggcggctgcatgggcgagcagtcggtgccggacaagattccgaacgggcagggcgatgacttccgcgggccgggcccgggcacgagttcgcgcgcctcgcacggaggcagcgccgatgtgcgcggatccggagatgggcaggacggcgcaggccctgatgcggcagatcgcggcgaggaggatgcagcagatggccaaggttcgcgcggcgatacgtgctcgcagacggcgggcgccgggtcttcgcgcggcagcaacgcacaggacacgtcgagcagaagcgatgagcctgctcggagcaaggactcgcatcgccacgaggaccaggcgcgttcggaatcggatacggacctctcgctcggcgaaaacgacatggccgggttcgggggcctgaccggcagtcccgagggcggtcggttaggctcgggctcttctacgcagccgggcacgccacaaggcggcgcgggcaatgccgggtcgcgtgatgtgagcggctccgggggagcctccgg

SEQ ID NO: 4477 - DNA, 2319 bp, Unknown
  16S sequences of unknown bacteria
caatagcggccttggtgagatggatgcggcgacgctcgccaatgtcaagtggctcatgacctacatcaacgacagcaaggcatccaatgtaggccagctctttatggcggtccaaacctatgtgtgggaccatcagagctacaagggagaacccggcggggatggcgatgcaggcggctatatttttttgagcggaaatgccgccctttttcataaagcaccgccgagaaattgttgtcgtcggccgaaagggtgcgcctgacggtcatgaccgactgggaaagaccgaatttttcggctgccgcggcggccgattcggcgcaggtgagatttccgccctctcctattccgaaaagcattttgagatgattttcgttggcaatgagcacatcggtttgataaagcagcggagcaagtgtctttgaggccttttccaccgaccaaagagccgagcggtaattaaggtcgcagctgacggtcagtccctttttctttgccgattccaccgctttttcagtcagttcggcggccgatggcgaaagggcgggagttatgccggaaaaatgaaaccagcctgcgccgtcaaaaatctcgtcaaaatcgaagtcggccgactcggccttcgaaaaaaccgagccctctctgtcatatataacctttgaggggcgctgagccgcgcccttttcgagataataaacaccgagtctcccctgttttttcacacagtgggcggtggacactccgaaggaacggacaaaattctcggccgctcttccgaggtcgttttcgggaagggcggtgacgaattcggcggggcagcccatgttgcagagggcgacggcgacgtttgcctcgcttccgccgtagttcacgtcgaggcggtcggcctggagaaatctttttcttccttcgggagaaagacggagcattatctccccgagagttacaacctttttcatgcctttatacctcccaaaatttccacggcctttttgcatatttcggttatgccgtcaaagtcgccgctcgaaatgagcttgccgctcaccataaagctgcctccgcaggcaaaaaccgacggcaaagcaaggtaatcggccagattttcaagacttatgccgcctgtgggcatgaatttgactccgccgtagggagccgacagcgctttaagcatggccgtgccgcccgcgctctcggcagggaaaaatttaaggtaggaaaggccgagggacagcgccttttcgatgtcggacggggtcatgacgccgggcataaaggggatgttttccttttggcaatattccgccgtattttcgttaagcccggggcttacgaaaaattccgcccccgcattccttgctctttcgacctgttcggggcaaagcagcgttcccgcgccgacgagcatttggggaaattcccttttgacaagccttatggcctcctcggcggcaggggtgcggaaggtgatttcggcaagaggcagccccccctccgtaagagcctgcgcaaggggcagcgcgtcctctacattttctattttaacgaccggaacaagccttgcggccgccagtctttccgttgttttatccattttttcctccataaacggctcggcgccgatttggcttaaattgtaacatattttttccctttgtgcaacacggcaggccaaaatattcttgacagacaaaaggggacaatataaaatcaatgtgaggtgaataaattgatcagaaaaacaattgcttttatttgctgcgccgccgtggcgctgtcggcactctgcttgcctgccgcgggagagcaagccgttacggtcataaacggcaacgagcttgaaacgttcaagggccgcaccaaggaacagctttttgccctttggcaggcggccgaggtaaaggaatacgactcgatttacgaaacgggaaaggaagcctccttttcggcgccatacagcggaggcgtcataaagcaggaggtgctcgacaatgtacagagcaatctcaactattaccgcgctctcacgggcagcccgcaaattaccgaaaggtttgtaaatcagcccgagctgcaaaacgcctcggtgcttcaggccataaatcttcgggacagggaaaacggcgtgggactcacccacaccctttggaattatcccaagcccgacgacatggacagcgatttttacaattcggccgcttgcgcaagccacaacatcatttccacctacggctatcgctcggccataagaggatttttctcggaaagcacctttatctacacggccggtcaccgcaccgctctgctttcgccctacat

SEQ ID NO: 4478 - DNA, 29046 bp, Unknown
  16S sequences of unknown bacteria
ttgttcttttgtctctttcttggcataataatagtccccttattgtagtctcgaattttttgctatttcgagtgtctactctaaggggactatatcaaacgcttccgggaagtgtattcgtgcaagcggggaaaatcaggattccagctcctccgcggggatgagcgccatgacctgggcgcagcggggacaaaggccctcggcattgggctccagagtgtgcatccagcagcgggggcactttgcaccggcggcttcgcagacctcaatggtcagccccgggaaggcggcactatccttgacgacattgccgcgatccggcgtgccatcgcagaagctgacgcgggagacgatgaacagctctgccaggtccaggccctggatcgcatccagcgcagtcttcgcgtcgccctggcaatagaggttgacctgggcttccagcgccttgccaatgcgcttgtctgcccgggcggcttcgaggacggcattgacctcggagcggacggcgatgagggtatcccacttggccatcgcttctgcgggcagggcatactgggtgtagggcttgctcatctcgttgagcagaatattgcgggcatcctccccgtcacgatggggcatggccagccagatctcattgcaggtgaaggcgaggatcggcgcaaacatcttggccatcgcgtcgaggatcaggtacagtgcggtctgggcgctgcggcgggccaggctgttgcggccatcgcagtacaggcggtccttgatgatatccagatagaacgaggagagaacgacgacacagaaatcattgatggcgtgggagacggtgtggaattcgtagtcgcagtaggccgcttccaccttttccatcagggcgttgcacttggtcatggcccagcggtccagctccagcatatccgccggggcgacgaggtgggcagggtcgaagtctaccagattgtctaggcagtatttgctggtgttgcggaatttcaggtagctctggctcagctgcttgaagatatccttcgagcagcggacatcggcgtgatagtccgaagaaccggcccacaggcgcagcatatctgcgccgaattccttgatgatctcgttggggtccataccgttgcccaggctcttgtgcatggcgcggccttcgccgtcgacggtccagccgtgggtcaggcattctttgaagggcgcgcccttgccgaaggcgccgacggcggtcagcaagctgctctggaaccagccgcggtactggtccgcgccttcgatatacatgtcagcaggccagaagccctggtccagctgcatggaggccacgtgggaggagccggagtcaaaccagccgtccagcgtgtccgtctctttttcaaattttatgccgccgcagtgggggcaggtgaagccttcgggcagaatctccgattcgtccagctcaaaccaggcattgctgcccttggcggcgaacagcttggagatggcgtcgatgctttcgtcgttgcagatgggcttgccgcagtccttgcaatagacgacggggatgggcaggccccagcggcgctgacgggagatgcaccagtcggcgcgctcccggatcatggcgatcatgcgctccttgccccaggccgggagccagcggatgttgtcgcaggctttgacggcgtcgtccttaaaggattcgacggagcagaaccactggggggtggcgcggaagatgatggggtgcttgcagcgccagcagtgggggtagctatggacgatctcttctgaggcgaagaggaagccgctctgccgcaggtccgccaggatgacggggttggattcgtctgtcttcatgccggcgtatttcccggcgtagtccgtgtggcggccctgatcgtctacgggaacgaccatgtccatgccgtagcgcagacaggtctggtagtcgtcagcgccgaagccgggggcggtgtggacgcagccggtaccggagtccatggtgacgtaatccgccagcaccaggcgagaggtcttgggcaggaagggatgctgggccagcatattttcaaagaacgcgccggggtggcggtcgatgatctcatagtgcttgaagccgccgatgcccatgaccttttccgtcagcgcttcggccatgatataggtctcgccattgtctgccttgacgaggacgtagctctcccgggggttcagggcgatggccaggttgcccggcagggtccagatcgtcgtcgtccagatgacgaagaagagcttggatttgtcgacctccggcagcaggcccttgtcgtcctgcatggggaatttgacatagaccgtggtgcaggggtcgtcctggtattcgatctcggcttcggccagggcagtctcatccttcgggcaccagtagacaggcttgaggcccttgtagatatagcccttctggaacattttaccaaagaccttgacctcctccgcctcaaagctgcgattcatggtcttataagggtgcgcccagtcaccgatgacgcccatgcgcttgaatccggccatctggcggtcgatatacgtttgggcaaagtcatggcaggcggagcggaagtccgcgacggacatggccttgtgattcagcttgtttttcttgatgatggccgattcaatgggcataccatggttatcccagccgggaatgtagggggtgtagtagccgcgcatagcgtagctgcggacgatgaagtccttgagggccttgttcagcgcgtggcccatgtggatatcgccgttggagaagggagggccgtcgtgcaggctgaagcggggcttgccctcgttcttcttcagcatttcgccgtacaggtccatttcctgccactgggccagcatggccggctcccggttcggcaggttgccccgcatggggaacccggatttttgcatgttcagtgtcttcttatactccatatcgtaacctccagatcgggtattttacatattggaatgcgccgcctgtgcggtgcagcgcaagcgggcgcgagaaaacgcctttgcctcccattgcaagagacaaaggcgctctaacctctgcggtaccactctcattgccggattcccggccactttgcggcgcgataacgggcgcccagccgcccggcttactgcattgttcagccggatgctccaaggggatattcacgcgccgccgccattgcctcgcaccgcccggcaactctctgaaggggaaagacgcgctgtttgtccttttcatcgcaagtggaatattaaaaatataataatataacgtggaatgctgaaatcgtaaattatttctctttcgggttataattcttcccaaatttcagctcgccaaacttggcagtgatggattctggatgcaggccgcgcaggaccttggtgtcaaaggtcgtatctggcgtttcagtgccgacaatcttttccaggttctgctcaatctgcgcggcaatctcatcgctggcactgtctgctggggcgctctcggctgcttcggacggcgcttcggcctgttccgtgaccggggtgggggtcaggtccatcatcttgagcttgttgagaagctccgtgtgatgctggatatcctgctccatggcggcgataaagctgctggcagcttccttggccttgttcaggcgctccgtctccaggtcgatctcctgcgtgcgggcggccatgacagcggtatgctgcgcgtttttctctgcctcgttcatcagcgcggcggccttgcgctctgcatcctgcacgacccggtccgccgtctgctgggcggcgaccatggcgttttgcatcgtggcttcctgcttgcggtattcctccagcttttccaccagaacccgcagcttgcttttcagcacggcattttctttgtaaagggttttgtagtcctccgccagcggcatcagcagctcatctaccgactgcatatcatatccgccaaatactgccttcgggaagaccatctcatcgagttgttgcggcgttaccatgcgttgtcactcctcgtgctaaaatcagaaatacatcccgttattttccagctcttccaccagatctcccacgatatcgacattgagaggcgttataatataggtggagatggcgaccttcttgatcttgccgtccagcgcataggcgcagccggagaggaaatcgaccaagcggcgggcaacgtccttattggtggactccaggttcaaaacaacggcgcggcgctcccgcaggtgctctgcgatctcagagacattgtcaaaccgctccggcttgaccagaacgacctgcagctgggccgtggtatgcacattgacgatcttgccgccgcggcgggactccgctgcgctgcgggattctggtgcactgaaggccggggcagagcggcgggcacggggcgcgggctccggagcttcgtcctcttcatcttcaaaatcgtcattgtcgtaatcatcgtaatcgtcttcgtcgtcttcggcatagggtcgtgcgagcttcttcagttcatccatgaatcccatgtagtaattcctcctatatctatctgtagaattttatttattgtaatgccgggcaccgaaaattgccgtgccaacacggatcatcgtactaccggcggagatggcgtcttcaaaatcatcggacatgcccatggagagacaatccatagagacattatcgtatttttttgccccaatgtcaacaaaaaggttgcgcatttcggcaaaatatctgagattatccccttttttttcactgacgggcggaattgccatcaaaccgcgcagccggacatggggataatttgacatcgccgccgcaatttcccagctttccgcaacggtgaagccggatttgctctcctcctggccaatgttaatctccagcaggatatcctgcacgaggccctttttcgctgctgctttttcaatgcattccagcagctccagccggtccactgactgaatgaggtcgacagcgcccacgacctgcttgaccttgttcgtctgcaggtggccgataaaatggacaggctttcctgtataagcccccaggggctgcttttgtgtcaactcctgtacgcggttttccccgcagcagtcgacaccaccggcgacggcggccttgacccggtcggcgtcgttcatttttgaggcggcgcacaggaggatctcctgcgggtctcgcccggcagcgcgggctgcagcgttcattttttcgcgaatcccggcaatattctgtgcaatttcttctctataatccatggttatgacacgacctttccatcaaacagcgtctgtgaagtcagtataatctcatcgcccggccaaagattgtcgatcgagcgcttgtcttcggtgacgatgtagctttctccgatatcatatagaatttcaatatttttccaaacggcattggtgccggagaggacatagaccccggcactgccggtatcgtcagaataatagactgcctgctttggaacgcggagccccttgtgggagcgggcaacgatatctgccgactgcactcgcaggctggtggcatcactgatgtcgtcagtgcagcggaggatcagcaggcgcttgccgtctgcctcgtcagagatgcgccagacgctcatctccaattcgtcctggaatccggcggcaaagctggcctggacccggtcgcccttttgcaggtcggcgatttggtccgattccacggcggcggcatagtaccagtccgaggaggtgaccagcttaccgatggcgccctggggcgcctgtacggcttggttcgtgacggaattgaactgctccagcgtcatggtgtgcagtgcctgagacgagagcagcgactcgtagccgtcgacggtgccggagaagtagcctgccgtatccactgtgatgctggcggcaccgccggagagctgctgctgcagcgtgtcgcgctgcgccgtcagatcactgatgcgggaggacagcgcggtaagattatcctcgtcgagatagcggcgcaggacccgggatttgagctggctgccggagctggcggccgctgtcaggctgccccgggcggtatagacggcgcactgggtgagatcggttagaatttcgttttccagcgcctgctggtcgatcttcgtgctgctggaatgataggcatattgcagctgagagagctgctcttctaggttggtgatctcgccctgcaggtcctgggtctgactgtcgcggtatgcggtggcgactgtggcaccctgggcgaccttttcgccctcggacctagtcagcacgttaatggcagcgtcagaggtgagaaccgtctcatcacgcacaacaaagccggtggtggataaaccctccccggcttcgtaggccaatgccgttacggtggtgatggaggtcttcatcgcggaaaacgcggccaggatgatataggccagcagcgccaccagtaaaacggcaaagatgatttttgtgaaaagtgtaccttgtttcatgctctggactcccgaagcaccccagggcatggcacagcggctcagtcctgcagggacttcaatgtgtgatagggaatgatcgtggagatggcatgcttgtagatcatcgcctgcttgctgtcggtcagcagcaggacgacgaagctgtcataccccgccacgatgccgcgcatctggtagccgttcatcaagaagaacgttgccattacgcgatcctgtttaagctcatgtaagaattggtcctgatacgtttccattgctgttgtcatatgggtttacctcgtttctttgtgtaattacccatattttaacagctaaggcttgtcgaaagcggaaacaatttgtagagcctgggaaaaagttttttccgcgtccggcgcggcggtctgcaggatccagtggacggcgggattgcgccggaaccaggtcagctgccgcttggcgtagcgccgggaagcttggcaaatttgcgccagtgcttccgcttctgtcattgccccgtccagcgtggcaaggcactccttgtagccgatggcctgcatggcggtggcccgggggctgatgccctgggccagaagacggcggacctcgtccagcagcccctgggccatcatctgcgcggcccgctggtcgatcctggcgtagagatcctgccggctttcaaaatccaggcccagccagagcgcttcatgccgggggggcagcgcccgggtgcgggcattgtgggccgtgatggtctggcctgtctccagatagacctccgcggcgcggatgatgcgcttctggtccgacgggtgtagccgccgggcagagtcggggtcgaactgctccagcagcgcaatgacagcgccgatgccctttcgggctgccagcgcctccagctcctggcgctttcccgtcgccggatagggggcaaacgtgcggcccgcgacgagggagtcgatatagagcccggtaccgccggtcaggatggcgtatttgccccggcgcaggatatcctgcaggattggttccgcttccgtgacaaagcgggagacggagtagtcctccgacggctggatgaggtccagcatatggtgccggacgccctgcatctccgccggggcgactttggcggtgccaatgtccatcccctggtagatctgcatggagtcgcaggagagaacctcgccgccaagcgcctgggccaggcggatggacaggccggtttttccagaggccgtcggcccgacgatgcaaatgattttttccatgaataagctcccgtcaggtccgcttgaattggcgctccagctggctgcggcgcagcgtcatgcagatggggcggccgtgggggcagtatttgaggtcatcccgggagagaacctcccggaccagggcgtcccgctccggggcctcggtgtgccagcccgccttgatggcggctttgcaggcgatggtgtgcagcaggtcatcccgcaggctgtccgtcggacgggagatcttcaggcgctcggctagctcgctcaggcaggcgatggcgtcgtctgcactgatctccgacgggacctggcggatggccagcgtgccgccgccgaagtcttcgacctcataacccagctccagcagcagggcgcggcgctccagcaggagggccgcttcttcctggtcgggccggtaggtcagtggggtcagcaggcgctggcccatgtaggtgttgggattctttttcagccgctcgaacaaaatccgctcatgggcggcatgcttgtcgataaacaaaacggtatcaccctgctcaacgatgatataggtgcgcagcacctcgccgacgacgcggtaatccgctggggtagccatggcgggcagcgcctgctgcgcctccggttctgccagagcagatgccggtttggcagccgcttcgcctgctggtgcagcgaccggtttcacgattggtgcagactggggagcgcagggcagcggagcagcggggtgcgctgcctgggccgcctgcgtggccgggcgctggatttggctgtgcaggggcgcagagctctcggcctgctccgcaaaggcctgcaggacacgctgggccggggcggcggacggcgtctgcccccgcgcgctggaaagggcacgatacgcctcggcggacatcgtctggaagccaggctggggcgcggcaggctttgcgctgcctgcgggcttgggctgtgccggcaccgtaggtgctgcctggggcagatgcatctctacccggcccggcgcccggttcagcgtcgccaaaacgccgtagcggatgcagtcgctgacagcccgctcggataaaaagcggacctccgtttttgcaggatggacattgacgtccactagatggggcggaagctgcaggtgcagcacacagcccggcatccggccgaccatgatctggttctgatacgcatcctccaacgcggcggagagcagccgggacttgatatagcgcccgttgacgaagaatgcttcgtaattgcggttgccccgggtgactgtcggttttgtgacaaagccgtccagctgcatattctcccacatactgtggaccggcagcatgcccccggcaagctcgcggccccagacgctatagatggcgctgtgcagctgcccgtcgccgggggtgcgcagcagctcctgcccgtcgcggataaagcagatggagagcgcgggatgtgccagcgcttgcttttgcacggcggcgaagataaacgcgccctcggcagcgtcgctcttcataaatttcatccgggccggggtgttatagaacagatcccggacgatgatcgtcgtccccggggggcagccggcttcgtcctggcgggtgatttttccggcctccagatgcaggctcgtcccggcgggggcgtccgccgtgcgggtcaaaagatcgatttttgaaacagaggagatggcagccagtgcctcgccccggaagcccagggtctggatggcggcaaggtccgccgcgtctttaatcttactggtggcgtggcgcaggaaggcgatgcgggcgtcctctggagccatgccgcagccgtcgtcgcaaaggcggatgaaggtcatgccaccgtccttaatctcgacggtgatatgctgtgcaccggcgtcgatggcgttttccagcagctccttgacgacggagcccgggcgctcaacgacctcgcctgcggcgataaggtccgccacatggggggagagctgattgatttttggcattgtgttccctccttgcgcttacattgcctgcagtgccagcatggaaagggcgttgatcgccatatgcaggacgatggaggcccagatagaatccgcccgctcataaacccaggccagggcgatcccagcgggcaggtattgcagcagactcaggccgagctgccaggcagggaccgtgccgagatagccgacgatgtgcagggccgcaaaggccagcgccgagacggcataggccaggatccggtgctttttgtggatgctggaaaaaataaggccgcggaagagtgattcctccgtcaccggggccagggccacggtgtaaagcagcatggcacggtaatcgacaccggccatggtcgtgatcgagtcgttattggcgttgcgcaggcctgggtagagccattgcagcagcccgttgatcgccgccgtcgccgcccagtagagcgcaaagcccaggatgatcgcctggagaaagccccaaaagcggcgggggatgttgctgaggtttgcaatcaaaaaccggtgaaagatgatggcgatggcgataaaattgatgagcccatagagcagattgattcgcgcctgggcgacgctgctgttcagatcatagccaagcagggccagcacaaagccgagcagtagcgagagcagcagcagatagcagggcaggtagatccacccagcgatggactccgcccgggtcagccggacggagagaacatttttttgattcatagaaactcctgaaaactcctggcttgcacaagcggcggcgttacagcagctgcttgagctcaaagataaaattcagcgcttcgatgggcgtcatcgtctccggggcggcggcctccagccgctggcagatggcgttggcagccagatcctgcaggcccagctgtccatcgtccggcgcaccttggactggctgctgcggcgcgggctgctgctgttccagctggcgcagcagcgcccgggcccgggtgatgacgacctccggcaggcccgccagcttggcgacctcgacgccgtaggattcatctgccgcgccgggaacaatcttccgcaggaagatgatatcgccttggcgttttttcacggcgatgttatagtttttgacattgggcagctcccgctcgatagcggtcagctcatggtaatgggtggcgaacagggtcttggcgccaagacgcttcgggtcagcggcatattccaggacggcccgggcgatggccatgccgtcaaaggtggaggtgccgcggccgatctcatcgagaatgagcagggagcggggcgtcgcgttgcgaagaatatcggcgacctcagtcatctcgaccataaaggtcgattgtccggcggccagatcgtctgacgcgccgatgcgggtaaagagccggtccacgacgccgatgtgcgccgagcgggccgggacaaagcagccaatctgcgccagcaggacaatcagcgccacctggcgcatataagtcgatttgcccgccatattggggccggtgatgatggcaacctggctgccctgcaggccgagtcgggtatcattggggacgaacagcgaaccctttagcacctgctccacgaccggatggcggccgtcgaggatttcaatttggccggccagatcgaccgtgggctttgtatagcggtgcttgactgccagtgcggcaaagcagctgaggacatccagctgcgccaccgcctgggctgtcgcctgtacgcgggccgcctggtccgccagatactggcgcagctctgtgaaaatactgtattccagggcgcagatgcggtccttggcggagagaatcgtgttttccaggtccttgagctcctgggtgatgtagcgttcgcagttgactagggtctgcttgcggatatacgtctccgggaccagatctgtctggcccttgctgacttcaatataatacccgaagacccggttgtagcccacccgtagattgcgaatgcccgttttttccttctcccgggcttcgatggcggtgagggtgccggtaccgccggacatgatatcccgcagctggtccacctcttcgctgtagccggggcggatcatgccgccctcccgcagggaaaacggcgggtcgtccacgatggcgcggtcaatgcgctggcacagatccgtgagggggtccagtgcctgggcaagctgcagcagtagtgtcgcgttgacgccttccagctgctgcaggacctccggcagggcgcggcagccgcccgccagggcgaccagatcccggcagttggccgagccggtgacgatgcgcgccatgagccgctcaaaatctgtgaccggccgcagagcgagaatcagctcctcccgccgaacggtctgctgggtcagctcctcgacggcgttcagccgcttttggatagccgtggggttcagcaggggcttttccagccagctgtgcagcaggcggccgcccatggctgtttttgtatggtccaggacccagagcagactgccgcgcttttccttggcccggagggtctgggtgatctccagatttcgccaggcggcggggtcgagctgcataaagcggtccgtcgtgtaaaattctaaggtattgatatgccgcaggtccagccgctggacccgccggagcgtcagcagcagcgcaccgcaggctcgcagggcgcgaacgtttgccggttccagcagcgcctggggcgcgggggaaaattgggcctgcacggcctgccgcgccgcgtccaggtcaaaaaattctgcccgctccgggtcgatgcagctgcccagccggtcctgcagcagggtaaggacctcttggctatctccagcatcgccgcccagcagcgcttccgctgggctgaaccgggcaagctcagagagcacccggtcacagctgccgtcgccgtcgagctccgtggcatagaccgcgccggtggagacatcgcagaagcagagcccccagcagctaccatcggcaaagagactggcaaaatagttgttacgccgctcttccagcatggagctctccgtcaccgcgccgggggtgacgacgcgggtgatatcccggctcaccaggcccttggccgtggccgggtcttccgtctgttcgcagatggcgactttatagcccttggcgacgagccgggcgatatagctttcggcagagtggaacggcacgccgcacatcggcgtctgctccgattctgccttgccccggtcccgggtcgtcaaggtcagctccagctccttggcggcgagtttggcgtcctcgcagaacatctcataaaaatcacccagccggaagaacaggatgcaatcctggtgctgcgccttgatctgcatatactgtttcatcatgggggtaagctctgccatgggaacgctcctttctgtgcggttttgtagggggtcagcggccggctgcggccagctcgccggtcaggctccaggtcgtgcaatccgtgatgcggacatcgcaaaattgcccgatcagcgccgggtcgccgggcaggcggaccagacggccaccgtcggtccggccggtcagaaggtccttgtccgtcccgtcgaggaggacgcggcaggtcttgccgatataagcctggtgcttttccagagagatgcggttctgggcctccagcaggcggtcaaagcggcgggtcttgtccgcccggggaaaggggtcgggcattttggccgctggggtgccgggccggggggagtagataaaggtgaacagcgcatcaaagcgcacggtttcgatcaggtgaagcgtatcttcaaactccgcctccgtctcgccggggaaaccgacgatgacatcggaggtgaagacaatctccggcattttctcccgcccgtagcggatgagctccaggtactgggcggcggtatagcggcggttcatctcccgcaggatgtggtcgttgccgctctgaaaggggaggtggaattgcttggcgattttttcatgggatgccatggtatcgaacaatttgcgtctggcgtccttcgggtgggaggtcataaagcgcaggacaaattcgcctggcagctcgctgatctgggccataagatcggcaaagtcgatgccgagccccagatccttgccgtaggagttgacattctggcccaggagggtgatatccttatagccctgggcgatgaggtcccggcattcctggaggatatcctccggctggcggctacgctcccggccccggacataggggacaatgcagtaggagcagaaattgttgcagccgtacataatggagacccacgccttgagatgcccagtgcggacggatgggatgccctcggcgatatttccggcgctttgctccgtggcaaagacgcggcggcctgtctgcaggacctgccagagaagctccggaaagcgccagagctcatgggggttaaagacgccatctacatggggatagctgcggcgcagccggtcgacgacctccgcctgcccggccatgcagccgcacaggaagattttctgccgcccgtggcggcgtttcgtatgcgtcagtgcgcccagattgccgaaaacgcgctgctccgcgtgctcccggatggcgcaggtattgaggatgaccacgtccgcgccttcttcgctggaggccatgccatagccgcaggtttccagcatcccacggatgcgttcggagtcggcttcgttctgctggcagccgtaggtatcgacaaaggcgacgggcgtgatgccctgggcctgccagtagtcccggatcttttggcaaatctcttcctgccggcgcagcgccgccggggcgataacggtggtctgatgttccaaggtgtgctcctccgcgatggtaaagattatgattcatattatagtaccatttttcgcgcccatttgcaagcccagccaccgaaaaccgccgctatttgcagcacgagagcgcgtgtcaaaaaggacttttgacacgcttcaaacgcgcctccgccgtatcagttcgagtaacaaaatcagcacgctgtgtaagcttgcgtgacaaaatcagagattttgacgctcacttaccgcttcgctgggctcgcgtttgcggggattgcaccctgctgtgcgcataatttctgcgctgaaagcgcagaaattccacaacgctgcatgggttcgacttgaccaaacacgcggcgcaaagcttgcgcgtttggagtctcacccacatgccgccggagaaaatgatttggactttatttgcgccgtgcgcggcgcaaactctgcgaggctcttttgacgggctgactgccgctatttgcagcaagggcagtctggaagggcggactggtctggagggtgctttttaaaagccttgggggggacttggtaataggccttgaaggcggcggtgaatttgccctggcggctgtagccgacggcctgggcaatctccgccaggcttagggatgtcatctgcagcagctcggcggcgcgctgcatccggtgctctttgatatgggcagcgatggaggtgccgtagacggatttgaagacctccttcagcgtcgtggggttcatcaggtattgccgtgccagggcctcgatcgtgaaacgctgggccatattctcgatcatctgggcatgaatctgtcggatgacagcgatctgctcggcccggtactgggtcaggggcacctggctggctggggtcatctcggagagatagagcagcagctccagcgctttgagcttctgccgggccgcctgcagcgggccgggcccggcggcaaggcccacaaagagcgcggcggtctcactgccccctggcagaggcagaaatgcctcgcccgcgccgaatttcgccgtgagcccggcaccggtaatcccggtaccggccagcagggggggtggcgcggcgtcaaactgggcagggtcgagccgcaggatcatgccctggggaatatcatccggctgcggcgggagggcctggcaagctgcgttcgctgtgtagacggcaaagtcgcccggccccagatagacatgctgcccctccggcagctgccagccgatgcgcccggcgatgcagtggcagagggtcaggatgccgggcacaggggccgcggcgggtgcgccggagaaggcgtccagtgtcaggccagggaagaggattgcggcgttgggacaattgatccgatccatggcgcacctcacaggctggggcaggcgatctccatgacctgctccagcatccggtgcagcagctgcgcttggacggtgtccgccgctttatagtagacctcccggccggcgcgttggctgacgattaggccgctggccttcaggggccgcagatggtgggagacggcaggcttggacatctgcagcagggccgcgatattcgtcacgcaggcccggtagtggcacagcagccagaagatgcgcagccgcgtcgggtcgcccagctgctggaatagggcggcggttttttgaaatgcttcggtcttttgtagcttttcctggatcgccgccagcggcgcgtcgccgccgtggtcgtggggcagatggatctcagacatggttccctcctgtttttatcccaatcggaaatgattttttcccatttggcagtccgttgcgactgccgcttgcttttttcgcttgcgctgattatactacaggcacatcgattaaacaagtgcttaatcattgaattaaacacaaacgatacgaaaggaaacgctgctatgaaaaaaacctatcagatcgaagtcgactgcgccaactgcgccaacctcatggaagaggctacgaacaagaccgagggcgtcgcccatgcaacagtgaattttatgacgcagaagatgatcgtcgaatttgacgagggcgccgacagcaaggcggtcatgaaggcggtcctgaaggcttgccgcaaggtcgagccggactgcgagatcgaactgtaacaaagctggcggcagccgctccgggagaaaaaccggggtggctgctgagtccataggaaaaggaggagaagggcatgagcagaaagcagaaaaaaatgctggtgcggatcatcatcgccgcggtgatgctgatcgcgctgaaatttatcccggtccggggtctggtgcagctggcactgtatctggtcgcgtacttggttattggatatgatattttgcgcaaggcgggcaagggcatcgtcaaccggcgggtctttgacgagaatttcctgatggccgtggcgacggtgggcgcctttgccctggcgctctatgaaaagagcggcgactacagcgaggccattgccgtcatgctgttttaccaggtgggcgagctgttccagagctacgcggtcggcaagagccgccggaatatcacggagctgatggatatccgcccggattacgcgaatgtggagcagggcggccagctgacccaggtgggcccggaggaggtcgccatcggcagtgtgatcgtggtgcagccgggcgaaaaggtcccgttggatggcatcgtgctggagggcgaatccagcctgaacaccagcgccctgaccggcgagagcctgccccgggacgtccacgccggggatgagatcatcagcggctgcatcaatatgaccggcgtcctgcgggtccggacgacgaaggaattcggcgagtccaccgtttcgaagatcctggagctggtggaggaatccagctcgcacaaatcaagatcggagaattttatctccaagtttgcaaagatctatacgcccgccgtctgctacggcgcgctggcgctggcggttctgccgcccctggtccggctgcttgcggggatggtccccgcctggggcgattggatctaccgggcgctgacgttcctcgtcatctcctgcccgtgcgcgctggtcatcagcatccccctgagcttcttcgccgggatcggcggggccagcaacgcgggcgtgctggtcaaggggtcgaattatctggaggccctctcccaggtcaaatgtgtcgtctttgataagaccgggaccttgacccagggtgtgttcgaggtcagcggtgtgcatcacagcccgctggatgacgccaagctgctggaatacgcggcgctggccgaatgcgcctcgtcgcaccccatcagcaagagcttgcagaaggcctgcggcaagcccattgaccgcagccgggtgacggatattcaggagatcagcggacacggtgtccgcgcccaggtcgacgggcacgccgttctggtgggcaacagcaagctcatgcggcaggagaacatcccctaccatgactgccacagtgttgggacgatcatccacatcgccatcgacggggcctacgccgggcatatcgtgatctcggaccttgtcaagccccattccaagcaggctattgccgccctcaagcaggcgggcgtggagaagacggtcatgctcaccggcgatgccaaggccgtggcagagcaggtcgcccaggagttgggcgtggacgaggtctacagcgagctgctgccggcagataaggtcacccaggtcgagcggctgctgcgggagaaagcgccgaaggcgaagctggccttcgctggcgacggcatcaacgatgcgccggtcctgacccgggcggatatcggcatcgccatgggcgccatgggcgcggatgctgccatcgaagcggcggacgtcgtcctgatggatgacgacccgatgaagatcgccaaggccatccgcatctcccgcaagtgcattgggatcgtctaccagaatatcgtgtttgccctgttcatcaaattcgcgtgcctggccctgggggccatcggcgtggccgatatgtgggctgccatcttcgccgacgtcggcgtcatggtcctggccgtcctcaacgccatccgcgccctgcgggtcaagaatttgtaagtgaaaatagcataataataccgcgcatgaataccatgtgcggtattatttgtactaccctgtttgcgtggctgagtataggttaaaaatcgttttgtgctgcgattttgcataagaaaaagcaagtgcagtcccgcttttagattggttccgctccgaattgcatattgcttcattacactgagctggacaataagtagagttgtagtagaaaatacaaaaatcgctttgctgtaccattgcgcgattgcgtgctatataggctgcttttcccaatacgggggagtggaaagggtaaatactgtcttcgtagccagcgcacagaaattgtatggtatagctgttagccttttgatagtttgtcctaatatgtacccgcttaatttgcgggtacatattttttagctgtgttactgtatcatagcacagtgtattaaaagcggagtggtcgccaaaaagaaaggttgtaacaccagcggttagcaattccaaaagcaattgctgaagttgaaatgttaatgcttcagttatgtcaatttttcgatgtccaataaagcagcaggtcatatgagaaggctccttacaaactgaattagtgcttcaaaaaattatcattcttgctgtatattatataactgctctaaatataagtcaaatgctttctgatgaagactgaatgatcggcaataatgttttataataattgtaataattcgaggtggaaagcatgggcaaagagatcgactttaaaaaccgggatcggtttattcagctgggcataacgatttccgtattgcggaagatgcggggcatgtcgcaggagaagcttgcggcggaggcgatgatgagccggtcgcatctgagtgcgatcgaagcgccaaatgtggttcgcccgttttcattggaaattctgttcaacattgccgatgccttggaggtcgcgccgggggatttgctcaatatgacggtgatcccagatgagatcatgaatcgaaaataacagccgcccagtacaactgagcggctgcgttttttaatgggaaagaaattatagcagaagtaacggcgctgcccggggtgagcagcgccgcttttgtgttggtaacttgttcagttacccctgatcccgcagggcggcttgcgcagcggcaagtcttgcaatggggacacggtaagggctgcaggagacgtaggtcaggccgatcttgtggcagaaggcgacggtgctcgggtcgccgccctgctcgccgcagatgcccagcttgatatccgggcgggtcttacggcccagctctgcggccatcttgaccagacggccgacgcctgcctggtccagcttggagaaggggtcggactcgtagatcttgcggtcgtaataggaggccaggaatttcccagcgtcgtcgcggctgaagccgaaggtcatctgggtcaggtcgttcgtgccgaaagagaagaaggcggcgtccttggcgatctcgtcggccgtcagagcggcgcgggggatctcgatcatagtgccgaccttatagggcatgtcagacccggcctcgcggatgagccgcttggcgactttgtcgatcacggacttgacatatgccagctctctggcctcgccgaccagcgggaccatgatctccgggacgatcttccaagctggccgacgggcccggacagccaaggctgccttgatgatcgcagcggtctgcattttggcgatctcgggataggtgacgtccaagcggcagccgcggtggcccatcatagggttgaattcatgcaggctggcgatgatatgctgcagatgttccacggagatcttcatctccttggccagggcttcaatatctgccgggtcggcgggcaggaactcgtgcagcggcgggtccagcaggcggatcgtgaccgggcggcccttcatggcttcgtagatcgcttcaaagtcgctttgctgcatcggctccagcttggccagcgcccgttcccgctgggcggacgtctcggagacaatcatctcccggatggcggagatgcgctccaggtcgaagaacatgtgttccgtgcggcacaggccgatgccctgggccccgaaggcggctgcctgggcggcgtcatggggcgtgtcggcgttggtgcggacctccagcttgcggaagcggtcagcccaggtcatgatgcggccaaactcgccggagatggatgcagcggctgtcaggatcttctgaccgtagatattgccggtggagccgtcgatagagagccagtcgccctctttaaacgtcttgccgcccagctcaaactgcttttttgcttcgtcgatgtggatatcgccgcagccggagacgcagcaggtgcccatgccccgggcgacgacggcggcgtggctcgtcatgccgccccggacggttaggatgccctgcgcgtagtgcataccttcgatgtcctccgggctggtctccagccgcaccaggacgatcttgtcgccgctcttggcgcggtcgacagcttcgtcggcggagaagacgatcttgccgcaggctgcgccgggggaggcggccaggcctgtgccgatgaccttggcttttttcagggccgccgggtcaaactgcgggtgcagcagcgcgtctaggctcttggggtcgatcatcaggacggcttcctcctcggtgatcatgccctcgtccaccaggtcgcaggcgattttcatggcagcggcagcggtacgtttgccgttgcgggtctggagcatgtagagctttttctcttcaatggtgaattccatatcctgcatatcccgatagtggaattccaggcgggcgcagatatcgacgaactggtcatagacctcaggcatgatctccttgagcttttcaatgctctggggtgtgcgcacgccggcgacgacgtcctcaccctgggcgttcatcaggaactcaccgaagagcttccgctcaccggtggccgggttccgggtgaaggcgacgccggtgccagaggtcggacccatattgccgaagaccatggactggacattgacggcggtgccccattccgaggggatatcgttcatgcggcggtagtaaatggcacgggggttgtcccagctgcggaagacggccttgatggcccccatgagctgctccttcgggtcctgcgggaagggctcaccgatcttggcctggtactcggccttgaatttttcggccagctcctgcaagtcttctgccgtcagctctgtatcgagcttgacgcctctggcctgcttcatctcgtcgatgagctgctcaaaatactttttgccgacctccatgacgacgtcagagtacatctggataaaccggcggtaggagtcgtaagcgaagcggggattgttcgtctttttggcaaaggctttgacgacctcgtcgttgaggcccaggttcaagatggtgtccatcatgccgggcatggacgcccgggcgccggagcggacggagacgagcaggggattgtagaggtcgccgaatttcttgccggtcagatcctccagcttttccacgtactgcatgatctcatcctggatgtcggcattgatctgccggtcgtccttgtagtactgggtgcaggcttctgtcgtgattgtgaagccctggggaaccggcataccgagattcgtcatctccgctaggttcgcgcccttgccgcctagcagctcccgcatggagccgttgccctctgaaaacaggtaaacaaatttttgtgccattgctgcatttcccctttcgaaggttttctgtcatggtattggatttttgaatcgccggaagtatagcacagagaaaaatgaatttcaatactttttatgcgcagaaaaatattttttacaccttaaaaatattgtatttcaaactttttctcgtgtttcaaaaatgagtgacggaaaacttgcaaggcgaggccggggaagatgcaaaaatgacggaaaaacctgcaagcattttgcggattctgcgggaatgcccggcgctgtatgcaaaatcgcggtgacatcaaaagacagcccgcgctggagaatcctgtgcatttttcgcggggaaatcctgcaaatttgtgcaatatgctgcggcctttgggcattcagccagcttggcgggggatgcggatcgtcaggataatctcctgctctgtatcctgccgctgggtgtccgcggcgatcccagcgtcgcggataagggtgagattgtgttccagggaattcaaaaatagccggatgtccttgcccaggaccgggcggcggggcgcgggctgcggctttggctggagcagctgggcgatcagtgcctccgtcgctgcaacattgagctgccgcttgacgatcttctcaatgacagccagccgggacgcctcgtccggcagccgcagcagcgcccgggcgtgccgctcagacagatggcaggcccgcagcgtttgcaggaccggggcgctgagctgcagcaggcgcagcttgttggccacggcggactgactcttgccgatgcgtgctgctgcctgctcctggcttagcccatagcggcggatgagctgggccagacctgcggcctcttccagatagtccaggtccttgcgctggagattctccaccagggcgacgaggccagactgggtgtcgtccaggaccagcaggacgcagggaacgctgcgcagcccggcaagcttggccgcacggagccgccgctccccggcgacaagctcatagccgtcagccctgcgccggaccgacagcggctgcagcacgccgtactggcggatgcttgcggccagctcctgcagggcagtctcgtcaaaaatccgccggggctgcgccggattgggccgcagctcgtccaccggcagaaaaatgatgcgccccgactccagcagtgtttttgcttttggttttgccacacgggttcctcctgttttcataagctgattccattctagcccatccgagggcaaaatcccgcgaaatgcccggggcctgccgccacttttttggccggaaagtttggaaaaatcgacggcctttcttgcataattgcacatactatgatatattgattttgtttaactggatttttccatagaaatggtgagcaatatgacagaaattattaccgaaaagacattacaggaatttgagacctttaaccagagccatcccaaggggaattttgctcagagctcgtactgggccaagcagaagccgatgtggctctggcgggccgtcgcctgcaggggggaggacgggaagatcaagggcaccgtctcggcgctgattcgcaaggtcccgggcctgccgtaccggatgatgtactgctgccgcggcccggtgtgcgatgtgcacgatacggcgacgttccaggagctgatcgcagcgctgcgggcacttgcccgggagtatcgctgctacgtgatcaaaatggacccggacgtcccctcggacgacgccgtctttgcccaaatgatgcaggatgctggcttccgcaaccggcataccggcgcgacatttgaagccatccagccgcgctatgtcttccgcctgaacctggagggcaagacgaacgacgagctgctggcctccttccatcagaagacccgctataacatccgcctggcggcccgcaagggcgtcgaggtccgggtttgcgggaaggagatgatccctgcttttgcagagctgatgctggttaccggcgttcgcgacgggtttgtgacccggcagccggagtattttgcagcgatgctggataatttgggtgagcattgcagactctatatggcgttccacgagggccagcccatcgcggggaccctggccatctggtatggcgataaggtctggtatctctacggtgcgtcctcaaacgagcaccggaatctgatgcccaactatctgctccagtggtcgatgatccagtgggcgacggagaagggctgccggatctatgatttccgcggtgtccccggccttgtaccggaggaccatccgctgtatggcctggtgaagttcaagcggggctttaacggcgattatacagagtttatcggtgagatggacctggtgctcaagcccgcggtctatttcgcggttgaaaagggcacgtccgttttcaaggagctgcgccgccagatctatctgctgcggcaccgggataaggccccggcgaagaaaaagggcgagcccggccagcccggcggtacggaggcgcaaaagggatgaaagcttacgtcgtagagagagaacacctggcgcagaacatccgggcgatccgggaggaggccggggagagcattgtctgggcggtcctcaagggcaatggctatggcctgggcgttgtccagatggcggagctgatgcgggaaaacggcatcgaccatttcgcggtgacagaagcgcgggaggcgcggctgctccgggaggcgggctttgaggaatcgccgatcctgatgctgcggcagacgatggagccagagctcattcatgaactgctggacctgcaggtcatcttcaccgtcggctcatccgccgctgccgaagcgctggatgctatggcagccgagcgctccgctatggcggaggtccatttgaaaattgataccggcatgggccgctacggcttcaagccggaggagcttccggcgctgctggaggtctatgcgtgccggaagaacatcgttgtgggcggcatttacacccatttcaactgcgccttctgcgacgataagcggacccagaagcagtataccgccttccgccgcgttgtgatggcaatcggggaggctggttttgaagtcggcatggtccactgctgcaattccgcggcgtttttgaaattcccgcagatgcggtccgatgcggtgcgcatcggctcggcgtttttggggcggctgtccttccaagatggactggggctcaagcgcatcggccacgccgaggcgacgatcgaggagctgcgccagctgcagccgggcgataccgtcggctacggcgccggttggagggccaagcggccgacgaagatcgcggtgctcagcatcggctggtaccacggcttcggtgcagaaaaggggcgggacctgttccgcatccgcgactgcatccgggagattttgcacaatctccgctggatctttaccggcaagcggctgcacgtgtgcgtcaatggggcgctgtgcagcgtcctgggccatgtgggcatggtcaatacgatcgtagatgtgacggatgtggactgcaagatcggcgatctggccgtgctgcaggtcaacccgctgcaggtcaagggcatgaagatcctttaccgctgagatggcaaaaatagagaaagtttctgcaggtaggagcgtaatatggcaaacaaacaggtacggcactggtatgacaaggtcgccaaaacagaaaagctgaacaagctggcctggatggcgcagcgcaacacgcgtaagctggagaaatggagccgggagggctatcagctgacgaaggtcacaaacgacctctactccttctctgaagcggagccggaggagcgcaagtacttcctgatgacgatcaacggttacagcaaggggaagaatatgaccgacgaatggttccgcgagatggagccctataccaaacgcgtcatttcccgggagggctggcggctcgtgctggagctggacccggaaaagctggatgacgaatactatttcatccagatgcggaaaatgaagaaggcgatgacgctcccggcgtttttcggcatttatggcttgatctggctgtgcctggcgctgacgatggactacatcccccttgtgatgttcctcatctgggccatgatcgccgccgcgctgggctacagcatctacacgctgctgacctgcctggcagagatccgccgtatcaagcgcgactgggtcgacacgttctgagcacactgggagcgcgcactgcgcgccgggagattttttgcaaaaaatttgtccgaccccattgcattttgcagcaaggggtgtataatataagtgtgtccggtaggtaaggctaccgcagggatacgggctgctgccgcaaaatggtggagacaccatgcgttggttggaacagttcatgtcgaagcacaaggcatgatctaatgcagttacattgccctgcgaagctgaagctcagacggtgcagttgccttggaagacaatgaatcccatgacgcctgccgtcatgggattttttacgtagaaaacgtgggtggaggtgaagaaaatggacgctggcagtagtaccggcactggaaaaggccgaagtagacgggggcatagcccgcgcgctgccgcgccgcgccccgtttgaccgctggccgttcgtgcccctgcttctgtctttattttcaggaaggaggacgcagaaatggcaaaagatctgctgatcattagcgaagcaatcgaaaaatttttggacgaaagaaagtacacgaccctgcgggatgtactcaagacgatgcaggcggcggatatcgccgcgttgtttgagatattgccccgccggaagctctcgctgctgttccggctgctgccgaaggagcaagcggcggaggcctttgtcgagatggatctggacctccaggagcatttgatccacggtttttctgataatgagctcaaagagatcgtggatgagctgtacctggacgatacggtggatatggtcgaggagctgccggccaatgtcgtcaaacggatcctggcccaggccaaccccgagacgcgccagctcatcaacgagatgctccagtacccggaggactctgccggcagcgtcatgacgacggagtatgtcgatctgtccgcggatatgaccgtcccggacgccatcaagcacatcaagcgcaccggcgtggacaaggagaccatcaacgtctgctacgtcaccagcagcgaccggaagctcatcggcgaggtgcccatccgcagcctgatcctggcggaggataaggaaacggtcggcgagattatgcagaaaaacgtcatcagtgtcacgacgcaggaggaccaggaagaggtcgcccagacgtttgccaagtatgactgcatcgccctgccggttgttgacagtgaggggcgcctggtcggcatcgtcaccgttgacgacgctattgatatcctgcagagcgaggcgacggaggatatcgacaagatggcagccgtgacaccgtcggaccggccgtatctgaagctctcgacctttgcaatctacaaaagccgcatcccgtggctgctgattttgatgatctcggccacattcaccggctcaatcatcacccactatgagtcggcgctgtcgtcgtacctggtgctgacggcgtccatccccatgctgatggataccggcggcaactgcggcagccaggcttcggcgacgatcatccgcggcatcagcctgcagcagatcaaattctccgatatcttccgcgtggtgtggaaggagacccgggtggcgctgctgtgcggcctgaccttggcggcggtgaatttcgtcaagctgatcttgctgagcaaggtgacggtcaccgtggcggcggtcatttgcctgacgctggtctttaccgtgtttgttgcgaagatcgtcggctgtacgctgccgattctggcaaagcgtgtcggtggcgacccggcggttatggcaagcccgtttttgacgacgatcgtcgacgcactgtcgctgatcatttattttgagatcgccggtgtgctgctgcatatttaagcctgcagccggcaaaaacgaagattctaacgcgcgcattgcgcaaaaaggaggcgggaagatggcgcatttgatcctgacggcgctctggctgctgtttttggtctgctggtttgtgatctatttttgcacggcgcagcagcaaagcggcggcgtggcgtggatcgcccggtatgaccggcaggcgtcgtcctttctcgcggcccgggaaaagctccggggacaggatgccgcctggctggcgggctgcgccattttgccggggttgagtgcatttctttggagcgggcagccgagcgtgctgctgtgcctgatgcctgcgctggcgggcgcggggctgtatctgctggggcggatgctgggcggcgtgccgctgctcacggcgctgagcgccgcaggtgtcgcggtcagtccggacctgcacccggcggcggggccgtttgtggtcgccgtgatactgttttaccggtggatgagcctgccgggggacaccggctttggtcgggaactggcttgcctgggcggcagcggtattgcgctgctgctggcggccctctgggcgcctgcggtctggtggggcctgccggtagcactggcccttggggctgtctgtctggcgcagcgctggcgggaggggctggcctataccggcggccgg

SEQ ID NO: 4479 - DNA, 3431 bp, Unknown
  16S sequences of unknown bacteria
gggcctggccgcctctccgggcgctgcctgcggccaggtggtgttcaccgccgacgaagccaaagaggctgttgaaagcggcaagatgaagaaggtcgttctggtccgtctggagaccagccccgaggacatcgaaggcatggccgtggcgcagggcatcctgacggtgcgcggcggcatgaccagccacgcggccgttgtggcccgcggtatgggtacctgctgcgtgtccggctgcggcgacatcgtcgtagattacgacaaaaaatgcttcacgctttccggcaagacctacagcgagggcgactggatctccatcgacggctccacgggcaacatctacggcgaggccgtgcccacggtggaagcctccatctccggcgattttggccgcttcatgggctgggccgacgccgcgcgcaagctggaagtgtttgccaacgcggacaacccccgcgatgccaagcaggccgtcgagttcggcgcggaaggcatcggcctgtgccgcaccgagcatatgttctttgaagccgaccgcatcaaggctgtgcgcgagatgatcgtagcccgcgacgtagaggcccgcaaggccgctttggccaaggttctgccgtatcagcagagcgatttcgaggccatgtacaaggtcatgggtgagcgcccgatgaccatccgctacctggacccgcccctccacgagttcctgcccaccaaggaagaggacatcgttgagctggcaaaggatctgggcatcaccgtggagcacctgcgcaatgtcatcgacagcctgcatgagttcaacccgatgatgggtcaccgcggctgccgcctggccgtttcttatccggaaattgccgagatgcagacgaccgccgtcatcaacgcggccatcaacgtcatcaaggagtgcggctacaacatcgtgccccacatcatgatcccgctggttggcgaagtgaaagagctgaagttcgtgaaagacgttgttgttgcaaccgcggacaagctgattgctgaggccggtgtggacatgaaatatgaggtcggcaccatgatcgagatcccgcgcgccgccctgacggccgacgagatcgccaaggaagccgaattcttctccttcggcaccaacgacctgacgcagatgactttcggcttcagccgcgacgatgcgggcaagttcctcagctattactacgacaacaaggtctacgagagcgacccgttcgcgcacctggaccaaaacggcgtaggcaagctggtggagatggctgcgaagctgggccgccagacccgtccggagctgggcctcggcatctgcggcgagcacggcggcgacccgacgagcgtcgagttctgccaccgcgtgggcctggactatgtgagctgctcccccttccgcgtgcccatcgcgcgccttgccgccgcacaggctgctattaaaggttaaaagggagtatacaccccgcttttccatcgtattttgattcagcaaaccgccccttatatggcttgacagccatataaggggcggtttcttgtttgtctccgcggcgcctgcgctgtccgggcgcagcgaagcgttcagtatttttccgggatgcggacgctcgccgccttataaaaattataattctccagcatgtataccttggctcgctttaaaacatggcgataacaatctgcaatgctgtccgcaaaggaagcggcatcgcctgcgcgcagatattggaccgaagcggcaacccgcccgttgagatcttccagcgcctgcctcctgtccgtatagtaagcaaaatagtacccccattccgtaaggcgaaaggtttcggccaacacgatacgcaggggttccaattcgatatgctttaaaatcgcctcaacgatctcaacgatacaaatggaatcgggcatcgcaaattttccatccagctcatcgagttcttttgcggtaaacagcggcgctgcagaaagcgccgcggggtggatgatcagcaccagtaattgcagtgcctgaagataccgcatggcttcttctgtgcgccgtgagctgaagatcacctggcttacccgggaagaatccggctctattactacagttcccttcccgttcagcgttttcacaaagcccctttgctccagctccgccaatgccttgcggaccgttgataccgaaacgccatactggcccgccagggctttttcatgaggaagatacgtcctgcgcggatactccccgctgccgatcttctggttcaggtcgctgattatcctcatataaaagtaatctttaccgcgcagcggccgccatgaaaatgcggcttcagacggcggcggacaatctggagcagtctccgccagatgcttcagcgtacattcgattgaacttgtgagcctttgatacagggccgtcagccggccgtgcttgacgacggggtccgtatctttcatgatatccatgataacacctgcaaacggcacggagccccgggggaaaaaatcataaaagcaggggcattgttctgtaaagaacgttaaatcgtggtacagttcaaatgttgaatagaggtcgcagagcaaagggcttccgcctatcttcaatacgtccctgtcgaaagcagaaaacgcacgccagccgccggctgcgacaccaatgcgcgatacgcgcatcgcctgtttataatggggcatcatttccaggctgcagttttgcgttgcaaacaccagaagcggcggaaggatcaaggtccatgtccggtatatctgtacaagcccttctctttttttcaaaatatcccgcagtatatgctccgaccctggcattttctccccgtcgaggacgaccggcgccaagcgcggctgtatctcgatcagtccatcttttttcaacgcgtcaaaaacccggttgaccgtataccggcttacatgatattgatcacaaagcatcctggaagacggaaggctgtttcccggaaggacctggccgtttagaatacgctgtttgacctcattgtatacaaatgaaaatttagtctcctgatgttccacgctccgtctccccttcccgcatctgttttaaccattccctttcgccaaagctattttaaggatattataacccttatatccctgcttgtcaggccaaaaagccaaagctattcgcttcccttaccaatattattgttgctatgccctaaactgttcctttatactaatagatagaaattcatttgtgaaagagattggttcccaatggaaaagcaaaaaatcctgattgcagacgattccgaaatgaaccgggcgcttttggtagatattctggagaatcaatacgatatcgtcgaagccgataacggcgcggcggcaattgatcttcttacacagtgcggcggagatttttcgcttctacttctggatatcatgatgcccgaaat

SEQ ID NO: 4480 - DNA, 4530 bp, Unknown
  16S sequences of unknown bacteria
ttttgatgttatacttgtcatagaaaattcacctcttatggtactttgtttttgtcgttattaacatcataccatatttgagatgaattttctttttattttgttacctatctattgtaccataacatattattttaaccgggatatatgagggcggagtgacgcggaaaatgtttttagtaaggggagcggcgcttatctgcgtgccgtagagtttttagcggtttttcgcttacgagatgcttttctgtcgccggaaaacgaaaaatgcggtgctgacgccgtaaaaaccgattttcgaatttattaagaggcggtcatatatctgtcttgaaaaattgatatttacggtataatatataaattgcacagattgggtaattaaatttaaaaccggcggccgggcttcggtgggtccggccgccgtgaaaagaaaggaaaaagtaaaatgaaagttatgagcaagcaaaggaacagtaaaatgtgtatagtctgcggcatggaaaatccaataggattaaaagctcagttttataatatggaagatgaaagtgttatgacaatattcaaatacagcgaggaatttcaaagctttccccaaagagttcacggggggctgatcgcaacaatgcttgacgagttgggcttgagagcgttgtgggcaaaaaagaaatcggaagatatattcggcgtaaccgtatcaattgagattaaatataggaagcctgtgccgtatgacgaaaccttgatcgggaaaggatcggtaaaaaaagaaacttcaagattcatagttgcatgcacagagctgtttgataaaaacgggcagctgcttgcaaatgcggaggtaaaatatatgaaatcagatgtgaataaaatttcaaaagaagtagattcacatgaagaaatgtgttatttgattgatgacgatatcaaagaaattgaatttgaaaattgattaaatacaaatagtatttgatgcgggattattgaggagcatcggcacaatcacttgacctgccgcagaaacacctgcttttatgcctgcctcatattatgtccgcgctttttaagccgcagaataaagaatacacagagcaagctctggcatacaagcataataatgcagccctcgagcttcatatctccgcccgaaagcaggcggtttccgctgagagtgagcttcagcaaatacggcttttcgtcaaaaagcgaaagactgccgaaaaccagcgagcttaaagcgttataaacaaaatgcgcggtaaacggggctaaaaccgaacgggtgtactctgcgagcaggcagagcacgaaattaccgagcagcatatttgccgcataaataatgccgcctttaaaaatacccggattcattgataggaaaagtaaggttattattaccgcgaccggtgcgaagccgtaatatttacggtaaagacggaaaagatacccgcgcagcagaagctctgtagcaagcgtattcatgaagattgcggcgagccaaataagagtgtttcccgggcggtttattcccgaaaaacgcaacgtccttataataaagagcggcagcacggtcagcacaagcggagtaataccggttataagccctatgctgtaatgcctgaatttattggccgtgttgaaaattttaagcctgttatgctcgaccgccgttttgaagagcagtgtgaatatcagcatcacagtaaagaaaacgccctcgcgccataaattgctcacggcggcgtttttcgcctttaccgacggcaggtaataggcgataactatggagagatcaaagaagaaaagcgttttgtaaatgtttataatcagatttttcacgcgcgtagcctctctgtttctttttttacaattatataacaacctgcccgtacaatcaaggcgaaatataaaaaatccgcaaattgcattttgcaatcggcggatttcggcattatcttttcttttttatcagatgtattataagtccgacgcaaagccccgcgaacgccggcagcagccaaccgaggtttttattgaacagcggaagatattttgccgcaagctctatcggaacatcaagccttaacaccttttgcaaaaattccggcagggtcttcatgcagtcgagtatcgctgccgcccaggttccgaccattacggatatgtacacggctctgtcgtgcccgaagaatttacctgtaaacgccagaatgataagtgcggttgcagggggatatatcagcataagcatgggaatcgaataatctattatcgcgctgagacctatatttgaaaccgcaaaggaaaataccgtgaataagattgcccagaccttatacggcaccttgccgttcgtcattttaacaaaggtctccgagcaggaggtaacaagccctatcgaggttttaagacaggcgaaggttattgtaaccgcaaggattatatttccggcgttgccgaggtaatgccccgcaatctgcgttaaggcgatgccgccgttttcggataattcaaaaagtccgcgcgactgcgtacccataagtatcgtcagaacataaatgattgccattaaggcgcctgtaagcacgcccgaacccaaaatatcgcgggcaacggcattgtcgtcgttaacacccatgcggcgtataacatcaattacaactataccgaaggcaagacccgcaattgcgtccatcgtgccgtagccctcaataaaggacgaaaaaaacgcgccgttcttatagccgtcaacgggctcaacctcggaaatcctcgccccgggggataaaagcgccgcaattatcagcaccgccaggaaaacaaggaacagagggttgattatcttgcctatccatagcgtgatttttcccggacgcagcgagaaaaacagaaccaaagcaaaaaaaaccgccgaaaaaataagcagagcgagccattccctcgaatcactgccgagcatgggggttacgccggtcgtaaaggaaaccgtggcgcatctcggaatcgcaaaaagcggccctattgtgagatataaaatacaggtgaaaaagattccgtacccgcgcccgaccttggaggacagggtctgcagaccgtcggaatgggtaattcctatcgcggcgacgccgagaatcggaatcccgaccgccgtaacaataaaacctatcatggcgtaaataacatttcttcccgccatttgacccagatgcaccggaaaaataagattgcccgcgccgaagaacataccgaaaagcgttcctgcaacaagtattttttgcttaaagctaagtttatccgtattcattaaataaaacacctcttttgatattctacattatatattgaaaaaagtaaaacaaacggttataatagttatatgacaatttgtaatacataaaggtgaaagcatggacggaaaaaagcttgaaatactaatgacggcggtggatctcggcagtctttcgaaggcatctgacgcggtgggatatacccaatccgggctgacgcaccttttcgacagccttgagcgcgagataggacttacgctgatacggcgcggacaccgcggaatttcgctgacgcgtgcgggagaggaattaatgccgtatatcagggaatttttgagagcgaacgcaaagcttgaaaatcgaatctcggcaataaccgagcaaagaagcgagaccgtaagggttgcggcatacgccagcatagcgatgcactggatgccggagatattgtaccgctttcgcagggtctgccccgacatcaatgtcgatcttcgtatggtggacaatgcgcttgagccgttcgaactgcttgaaagcgggaagacggatgtcatttttgccgcagggcagggcgccgatgttcatgattggactccgctttacgatgatattatgtatgcggtgctgccggctgattatccgctgacggacggtgagcatttttcggtcgacgaattctccgggaaggagtttataatgccctacgggagatttgatatagaggtaaacaaaattttttccgcaaacgggataagggcaaatataaagccggcgcacgtggatgacgaaaccgtgatacgcatggtcggcaagggactcggagtatctatgatgagcgaaatgatgatacgcggcagaaccgacgatgttaaggtgctgccgataagcccgtctgcgggcagaaaactcggaatgggaatgaacggcggcgggactgtggacggaatcggacgtctgaaggaatgcgtgcttgcatttttgggaaaggaaagcaggtgaatttctccgcggctcttgatttgagaaattcaaaaacggctctattatatatatgtatatacaaaaaatatccgtacacgattgaaatttcaataccgccgaaaataaaatgcatcttaaaaagacgatgagaagacgccgattccacaacatattggggaatctcggacaggcaaacaactattaaaaaaaacttttaaaaaaagataaaaaaagtgttgacaaaggggaggggttgtgg

SEQ ID NO: 4481 - DNA, 32759 bp, Unknown
  16S sequences of unknown bacteria
tcagccatttcattaccgttccggttttagagcaactcgtcaaaaacgacgtcgccgcgaaagccgagatgattataggtcacgaagcggaattcaaacagcggtatttacagcggcaatcgtcgcttgcggacaaaaaccaagccgacgtgaagaaagacttgaaacgatccgaaaaacgcttagcagaactcgataaactgattgaagcggcgtttgaagaaaaagtttcaggcaagattcccgaaagcgtgtgcgtgaaactgatcgacaagtataccgccgagcaaacggaattgaaagaaaaagtcgccgctctttcgcaagggcttgaagaagtaacacaggcaaaaacggatgtggacgaatttatccgcaggctgaaaacctatttcaattcgcctgctttaacccgtgaaatgtgcttggcgttattcgaccaccttgttatcggcggcaaagaatcgattacgggcaaaccgcaggaaatccatatttattacaaaatagatatcgattccatcatcacatcgtaacaaaaaatccctgaaaataagttttatgtccatttggcttatttgaaggctacgcagaatactattcggcagagttagcgcaaaaggtcaaacgcggtatgcgtgaatcgtgtctaaaaggaaatgcggcgggcatacagcctattcttggctatactattattgataagaaatatgcgattgttgaaagtgaagcaatgatagtgcgtaaaatgtttgatgattataataatggcgttaccataaaagagatcgtagaatggttaaagaactgcggggtgagaacgcataaaggcaatattttttcatttgggcgcgtttcggatttgctgcataatccgaaatatatagggaaatgcaaatacggtggcgaagtatatgataatatcgtgccgcctattatcgatgaaaaggtgttttataaggcacaggaaagactttcccaaaatgtacataaggcggcgcgggcgaaagcagcggaaaaatttatattgagcggcaagcttatatgtgcggattgcggttcattgatgacgggcgaaagcggaaaaagtaagacaggagaggtctatctctattacaaatgcagtaagaaaaagaaaggcacggaaagatgtccttctcgtgcagttaaaaaagatgatatagagaatagtgtttacaaagcaattctttcggcgttaaacgacgataactttattgcggaagtagccgaacaagcggttgaaattcataataaagatttaaccgaatcaagagaattaaaactcttaaaacagcaaaaatcggaagtggacaggaaactgaataatattacggaagcgatttgtaacggtatttttaatactatgacgcaagcgaaaatggtggagcttacaaatataagtaatgatttgcaagtgaaaatcatagaggaagaatcacgagttattgaaccgttgaaaaaagcaaaggtaattgctttcttgaaaaactatgcaaaaatagtgcaatgcgccaatcgcacggaaagccttgaaagcaagaaagctctgtttgacttgttcattaaagaagtaatatttgatggtgatcggtttttgattgttatgaaaacgacggatgacctcgatacggacaaatctgttcaaaaagacacaaaaaaagaaacaatccgaaaaaagttcgaattgcttcgttttggtgaccttatcgggactcgaacccgagtttacgccgtgagagggcgtcgtcttaaccgcttgaccataaggccgttgttcaattgcttatgtagtatagcatatttttcctttgagagcaactgtttttgactggtgaaaataaaatttttttactttttatgaaaaaataaaaatccgcctgtgccgcatttcggataaaagctaacccgctttcagcaggtgggtgcggcatcttgacgcatcggactttccgtataaatacagaccttgcctatcgccacgaatactcgctccctatttaataatgtggattacgattaatccgaactccgtacaccgcagattactctatattatagcgaaaaaaggctctcttgtcaaccaaatcgaagaaatttttatttcctaatctttccgtttaatttttcgaggaaaggaaaaatttccgcttcaaattccaacccgtaacgtctgtcaccgtttgccgcggctgtgcggaaaatagaagaagtggtaaaatcggcggacagacaaatcgcttcgtcgagcgttttccctctggcaaggcaccctgtaaacgccgccgcaaatacgtctccggctccgtgaaagaatcccgcggcatttttttctgcgtgacgcagtacccgattttcttttgtgtaatatacggcgttttcttctccttcttctactcccgtgacaatgggacaggtatgaagagaagaaagtttctgtacgattttttcggcgggaagagcctcgccgttctgcgggtaattttcgcctgcgagaaggcatgcttccgtaacattgggaagaatgaagtccgcttcactgcataaagcacgcattttttccacaaaatggaaattgaagtgcgcatataatttccctccgtcgcccatgacgggatctactacgaattttccgtgcggggcgagaaaattttttttgacggaaaggacggtatctatctgagaaatatttccaagataaccgctgtatataaaatcaaaggaaagccccagttttttccaatgcgcgagtatggaaggaatatcttccgaaagatcgcggaaggtatacccttcaaagccgcccgtatgcgtagagaggagggctgtgggcaaaacgtcgcatgtgattccgcatgcggagattatggggagcgctaccgcgagggagcattttcctacacaagagatgtcgttaatggcgagaatgcgcataaaaagtggacttccttaaaaaagttatatgaaactattataaatttcttgcttttttttgtcaaacggattaaaatagaaaagtaaaaatttccgtgcggaaacttccctcggagtaaagaggttttcatgactatgactattacaggcgaaccgaagacaaataccgttccgtattcggatttcgcaaaattcgaaaatcaagaaattacgataaccggcaccgtgcataacatccgcatgatgtcggattttgctttcgtcattctccgcaccgcgagagagacgattcaatgcgtctatgcggaatctttttccgattacagaatgccccccgaactcaaagaagagtgtgcggtaaaattgaccggaaaggtagttgcgggggaaacgaaggacggcggaaaacgctacgaaattcagatccacggcatcgatattttatctcaccccgcggaaattccgcccgtggtcatcacgaaaaaacaagtgcagtgcgatttgaacaccgatttggactatcggcccctcacgttgagaaatcctaatgaaagggcggtctttaagttccaggagggaatacagcgcggttttcgcgaatatctcatgtcccaaggatttaccgaaattcatactccgaaaatcaattttgcgggcgcggaaggcggcgcaaatcttttcgggctcgactatttcgggaaaaaggtatatctcgcgcagtctcctcagctttataaacaggctttggtcgccgtatatgagcgcgtatttgaaattgcgcccgtattccgcgcggagcatcacgataccagccgccacctcaacgaatatatttccatggattttgaaatgggttttatcgacggtttcgaggatattatgaacatggagacaggcatcctcaaatatatcatgaatcttctgaaaacggaatataaaaacgaagtggagcttctccgtgcagatattcccgaaattacagagattcccgtcatcaagttcatggaagcgaaagaaatcctcatgaagaaattcaagtataagccttcggatatgaaggatttcgaccccgaagaggaacagctcctcggaaaatatgcgaagaaacaattcaattccgattttattttcgtcacgcattacccttccagaaaacgtcccttctatacgatggacgaccccgacgatcccgaatatacgctgtctttcgatttgcttttccgcggcatggaaattacctcgggcggtcagcgcgtacacgattattttgctcaggtagaaaaaatgaagcgtttgggcatgaatcccgacgagttcgatacctatctcatgctccataaatacggagcgcctccgcacggcggattgggcttggggctggaacggctcacgatgcatctcctcggtttcaagaacgtacgagaagcggcgatgttcccgagagacatcaacagggtgacgccatgaaaaaagtgatcagtgtgggtgacctttgctgcgaacgctgtgcgaatcggcttgcctgtaagctggaattgtgcgagggagtcgtaaaagccaaggcaaactataaaaagaacaccatttacgtggaagttctgagcacgactcccgacagcgaattgaaagaagcggtgcagtccgcgggctttgaagttctttcgatagagcagagaaagggactttttgcgtaattttatccgatatagggaaaaatctgtctgttttgctttacaaatccttaaaaaagggatacaattaaaaaaattcataatttataaaagcgttttaagagggacaacgcttccgaggtgccgctgcacagagaaattccgttttgctgagaggaaaaaggcggtttcgggagttatcaccctttgagcttgcccgaccaactttttccgagctttggaagaaaaagtttctttttggaaaggaaaaaaaattccctaagaaagataaaagctgctttttcggaaaaaaagtaatcgtgcacggtctcgcccgccgttatccggggcggcaaatgtcagtttgttttggtggggtcgtgttttgtccaaaacgcggcctttcttttttgagaaaattacgataaacatgaaggacgaggagaaaacgttatgtcgatgtacaagaaagtagatacctcattgaactttgtcgagcgcgaaaagcaggtggtggactactggaacgaaaaccatatcttcgaagacagcgtgaagatgaacgaaggaaaagaggagttttccttctatgacggtccgcccacggcgaacggaaagccgcatatcggacacattctcacgcgcgtcatgaaggacatcgttccccgctatcagaccatgaagggaaaacacgttttaagaaaggcgggctgggatacgcacgggcttcccgtggaattggaagtggaaaagaagctcggtttcgatcacaagacggaaatcgaggcgtacggcatagaaccgtttataaaagaatgtaaaaaatccgtctggcaatataccagcgaatggaaacggatgtcggatcgcgtaggatattggtgcgacatggacaatccgtacgtgacctatcatgacgactacatcgaatcggagtggtgggcgctcaaaaaaatccatgaaaaggggcttctctataaggggcataaaatcgttccttattgcccgcgctgcggaacggcgctttcgtcgcacgaggtcgcgcaaggttataaagacgtcaaacaggtcacggctttcgtcaaatttaaggtgaaaggagacgaaaacagatatatcctcgcatggacgaccacgccttggacgcttccttccaacgtcgcgctctgcatgaatcccgacgccgattacgtcgagatcgagtgcgaggagtcgggagagaaatatattctggcggaagcgctcgcccccgcggtgttcgcagaggaaaaatataccgttctttccaaaaagaaggggaaggaatacgagtataccgaatacgagccgttatatccttacggaaaggaaaaattcgctttccgcgaaaaggcgtattacgtcacctgcgacgattacgttacgctttccgacggtacgggcgtcgtccacaccgcgaccgctttcggcgaggacgactatcgcgtagggcggaagtataatcttcccgtcgtacagctcattgacgaggagggaaaattcccgtcggactgcgattttctcacgggaatggccgcgcaggccgccgatccgctggtcataaaggatcttaaagctcggggactccttctcaaaacgcaggaaatcgtacacagctatcccttctgctggcgctgtgatacgccgcttatttattacgcccgttccagctggtttatcaaagtgacggccgtcaaggaccgcctgatcgccgcaaaccgttccgtgaactggatgcccgatacgatcaaggaaggccgcatgggcaatttcctcgaaaacgtcatcgattgggggctttcccgcgatcgctactggggaacgcctctgcccgtttgggtgtgtcccgattgcggcgaaatcgaagtcataggatccaaggcggaactgaaagaaagatgcggagttaaaggggatatagagcttcaccgcccgtacctcgataaccttacttgcacttgtaaaaagtgcggagggaaaatgtcgcgcacgcccgaggtaatcgactgctggttcgattcgggttccatgccgttcgcgcagtatcactatccgtttgaaaacaaggagcttttcgacgagaccttccccgccgactttatttccgaagcagtcgatcaaacgcggggctggttctatactctgctcgtcatttctacgattcttttcgacaaggcgcccttcaaaaattgtatcgtactcggtcacgtcaacgacaaaaacggcatcaagatgtccaagcacaagggcaacgtcgtcgatccgtggtcggtgctcgacaagcagggcgcggatgccgtccgctggtatttttatacttcttcggcgccgtggcttccgtcgagattttatcccgaagccgtctccgaagcgcagagaaagtatatgggaaccctttggaatacctatgcctttttctgcctgtatgcagatatcgacggttatgatccttcaaaatacgatttgaaaaaatgccgcctctcgttgatggacaaatggattctgtccaagctcaatacgctcgtggatacggtggataaatatttggcagtgtataatatcacggacagcgcccgcgcgttgcaggatttctcggatattctttccaactggtacgtgcgccgcggccgcgaacgctattggggcagcgagatgacggacgacaaggcggccgcttatacgacgctctggaacgtcctcgtcacgttcgcaaagctcaccgcgccttatacgccgttcattgcggaagaaatgtatctcaatctcgttccgaatttcttttcgggcgcgcccaagtcggtgcacatgtgctccttccccgtctgcgataaatcttttgtggacgaaagcctcgaaaaaggcatggacagcgtcctcgatatcgtcaatctcggcagagccgcccgcaacgccggcaatgtcaaaaatcgtcagcctctttccgagatgtacgtcgtcacggcgaaggatttgggcctggacgagggattgaaagcgattgctttggacgaactcaacatcaagtgctataagacggcggaggacgcggacgaattcatttcttataaactcaaacctcagttaaagacgctcggtcccaaatacggaaagaaactagggctcatcagtaaattccttgcagaatgcgacgcgaaagcggtcgtggaggccgttcaaggcggaggcgaatacgttcttccctcggatcgggagatcgttctcaaagaggaagatttgcagattttcaccgagagcaaggccggatttatctccgccagcgacaagggaatcacggtggctttgaataccgaactgaccgaagaactcatcgcggaaggaatagagcgggagctcgtttccaaagttcagaccctgagaaaggaagcgggctttgaggttaccgacagaatcaggattttctactgtgcgaaaggccgcgcgggggaggcattaaaaaaagctgcgttcgcttcggacgtattggccgtgagcgtagaggaaggctcggccgacggctattccaaggaagtggatatcaacggtgagaaagtgacgctcacgctcgtaaagaactgatgaaaaaggagccgaaaaggctcttttttccttattggaggcggacggaaaaattttggcgatttttccctttttagttttgttttcgtgggcaaaacactttacaaaagaatggttttccgatataataaaaaggtcagaatgtcggattatgtcttttttcggaccggccttcggacgcaggcaacgacggcgaacatgctgcacagggaatttatgaaaatagcacagaattggacggattattcgattatcgccacgggcgacggttataaactcgaacgctggaaggacgtgtatctccttcggcccgacccgcaggtcatttggtcggcccgtgcggatctgttctcctatcccgagctcaacgccttttataagcgcagcgaaagcggcggcgggggctggaaatttttgaaacccatgcccgccgaatgggaaatttcctatgagaagctgggactcaggttcaaaattaagcccatgggcttcaagcatacgggattatttcccgaacaggctgtcaactgggattatatgtcgaaactcattcgcggtgcaaatcgttcgataaaggtgctcaatttatttgcctatacgggcggagcgacggtcgcctgcgcgaaagcgggcgctcaggtcacgcatgtggacgccgcaaagggaatggtggaacgcgcgggcgaaaacgcgcggctttcgggaatcgattcgggaatccgctatatcgtggacgattgtctcaaattcgtccgtcgggaaattcgccgcggcaaccgttacgacgcgattatcatggatccgccctcctacggccgcggtccgggcggagaaatgtggaagatagaaaacgatttatttccctttgtaaaattgtgcggggaacttctgtccgagaatccgctcttctttctcatcaacagctatacgacgggcttgcagcccatggttctcaaaaatatactgacgctgacgctctcggggcgcggcggacataccgaagcctacgaggtgggcataaagacggaggaaggaatagaccttccctgcggagcgggaggaattttcgtcaatgactgaaaccgaacaaaaggactatcgtccgccctttgaaattctgtttgaagacaatcacatcatcgtcgttttgaagccgcagatgaccgcctgctgtcccgacgagagcagagatgacaatctgttggaccagataaaaacttatctgaaaatcacctacaataagcccggaaacgcgtatgcggggctcgtacaccgtctggacaggcccacgggaggtgtcatggtctacgccaagacgtccaaggcggccgctcggctcaccgaaggattgcagacgggggattttgaaaagaggtatctcaccgtcctttgcgggactcccgaccccgaacggggaacgctcaccaattatctccggaaaaatacggtcaacaatctcgtatatatctgtacgcagacggaggagggcgcaaagtttgcttctctcgactataaggttctcgaaagcaagggaaaatactcccttgcggaggtgaggctgcatacggggcgcacgcaccagatccgcgttcagatggcggggatctctcaccccgtttacggggatatgcgatacggaggcgctctggcgcagaaaggcaagctggccctgtgggcgtattcgctcgccttttctcatcccgtcaccaaagagcggttgcgctttttggcctatccgcccgaaaacgaaaccccgtggaaggctttcgatatcccgaatgcagtggaaatcaagtgaaaattgcgtaaaaaaagaaaaacagtttatttcaccgtgaaatgcgtttgacaaaaggcgcgtttgggtgtaaaatagagaaagcacaatattgtaaaaggtatagacttacaaaaattgcgaggcactgcttgaatgaaaaaaaagaataaagtcaaaattttaacttttctggttgcaggcgcaatcggaacggcggctttgggcggaggacttatgctcggcggaatcaaggccggtgcggtcacgtatgaaccttaccgtatctttacggcggaaaagtctgcttcggtggggaccgattcggacgacgatacgttgatggcctttactcttcccgacagcggaagcgtatctttcaaacgcgatttggctctgaaatggtacgacggtaaggacgccgcaaaatatctcacgatgaaattcgccctcaaggatacgaatttcgaaaaattgacgctcactttcgaagcggcgccctcgatggccatgaaagagaaaaaagcgacgaataccgtcgtttttgaaaaggcgaacggcaaggttaccgtcaaagtgaacgacggacaagccacggagctttcagatgaagcgctcaaagccgatatcgagctttcgcttgcggaaacggatgaggaaaataccgccggggaaggcgaatttttcgtccttttgaatgagagttacatcggtacgtttacgaatgtaggcgcgaatttcgcggaatattcttcgaccgcttcttccactcccatggtgcctttcgcctttacggcggaaatgcccgaaggtgcggaaggggactccgcgaccacgaagattcttttcaaggagctcaacgggcagtcctttgagctcgacgaggacaagaagattgcggataccgcgaagcccgttctcgtcgtcaacgattcgatttcttcgtttgcgttggggaccccgttctctctcgattatgaagtgatcgatgttttggatacttccgtcaccaagacgatggagtattatcaatacaatcctgatgatttctccgaggactcgacaaaggagccggaatacgaaactttgacgacgagcacctatttcatggatacgcccgtctataaagaaaagggaatggaatacatttccgtgcgtttcaagctcaatgacgataccttctccggcgacgacaacgcggcaacctatgaacttgtatggtatgcggaagagacggagaagcccacggaagattctaagctcgaatatatccgtgcggatcgcaacaccgagggacccgattatacctgtattgtcagagacgacgaaggaaatcacgaattggacggggacggaaacagtgttctcgacgaagcaaatcaagcctatctcgggtatcaggaagcggtggaagaagcggcgaaggacgtttatgcaggtacgaattcctatgtctatctgccttctccgataggccttatcacggacaacgataccggatataaaaatctcaaatataatatctattacaagacgcagacttcggacagccccgcttcgagcacgggaataagctatgaagatttgaaacttgctgtcggttcgacggggctctatgagttcaagattaccgcctccgacaaagcgggcaacgagatgtactgctacgtggacggttatcgcaccaaagtgacttccgataacgtttgggacatcgaagccattccttcctttactttctcgatttccaacagcggtataagcgtggaggaacccgatggaagcgacaatacggattctggatttatcgacgtcacctatacgctctccgactttacggtcgtgggaatcgacggacattcgagtgaatacggtttgtattatttcgataccgccgcattcagaaagcagtatcccgatacggatttctctgacagtgacttttctctcatcaaattctccgaactgaaagagaatgcggatttgtccaaagtggaggacgacgattatctcaattattatgcgggtttatacgccgagttgctttcaaagagattgggattgaatattacggccgatgacttgatgaagccgaattcggacggcgaagtgattttgcgcgagatagaaccttacgacgatacgatcgacgaagataaacatcccgatgtttggaaagaatcggataacaaatattattggtatccttcctcaaaatcttttaagccgcaggaacagggcgtctatatcgtcctcgccgtatttaccgatgcggaattgtcgggagagaaggccgccgcatatcaggccgtttccgtcaatgccaaagaagacacgatcaaaggcgagacgcagtggctgaaaaataacatcgtttccgtcgttttgttctccatcgcggccgtgatgttgattctcatcatcattctgctcgtcgtgaagccttccgatgaaactctggaagacgtagagaacggaaagaaaaagaagaaaaaatcaaaaaaggataaaaagtccgaattggagaaactcgacgaggacgaaaaaaagtaaatccagatagagaaaaatccgtttccgaataatcggaagcggattttttttgaaaaaggacatgtttttctttttctggcatatatttttcctatgacggatttgaatgaactgaaatcgggagaatatgcaaagatcctttccgtcgacgcggaaaaagacgtcaaagagcgtttgaggatgctcggcatcgctccgaacgaaaaagtaaagatgctcaaaaagatatttttcggccgcgaatgtcttttacagacagcgttcggccgcgtcggtatgcgcagggagtgtgcgcaaaaaatcaaaattgcccgattgtccgacaacgccgcttctttatccgaacgggaaacggcggacgaaaagacagaggagcgacaatcatgaaaattctacttacgggcaatcccaatgtcggaaaaaccacccttttcaacgctctgacgggagcgcacaaccgcacgggaaactatcacggagtcacggtcggcgtatccgaaaaaaattcctcgaagcgccttgcgctcggactgatcgcggatttacccggtctctattccctcgacggcatgagcatggaggaaaagctcgcggcgaagtatatagacgatcagaaaggggattttctcgtcgttcaggtagcggacgcggaacatttcaaacgctctctgaaattgacgaacagccttctttcccgcggacttcccgtcgtcttggttctgacgatgtgtaaaaaattccgtgcccgcggcggtaaactcgattgcggacggctgagcgaagcgttcggaattcgctgtatagagacagacgctttgcgcagaaagtccgtcaaagcgttggcggaagcgctcaaagaggtatttctttctctttcgcaatatagggaaaaatgtcggctttccccgttgagggacaaaaaatttttctcggaagcgtcatcgaatgttctttcgacgggggactcctttggcaagtatttttcgacggcctattctcccgcgcccgtcggtgcagataaacttaccaatctctgcctgaacgctttttttgccctgcccgcgtttttcgcgctcatagggttggtgtttttctttactttcggagaacatatgccgggggtgaggctcaaagaagcgcttgaagggctcatagaacgctttgcgggattctgcggcgaaaggatagaatctcccgtcgtgagaagtctcgtctgtgacggctttctcggcggtatcgggagtgttttatcttttgtcccgcagatagctctgatgtatttgtttctcgatttcctcgaagagagcggatttatgtctgcgctggcctttatgaccgacgggcttttttctaaaatcggattgtcgggcagagcggctttttccgttctgctgggatatggttgcaccgccgccgcgatcgtctctacccgcgcgttggaggagaaagctattcagaagagagcggtcgcctgtctgtattttgtcccttgcagcgcaaaacttcccgtctatctgacgctgctttcctccgtttttgaaaatacttttctgggcgcgctgcttctctatatactgggtacgggcatggggctggccgtcgcggctttcctcaaaaaagacgacagcatatttttaatggaaatcgcagatatttgctttcccgatatatttttcgtcataaaaaagttgctctttcagataaaacagtttataataaagatatcgacgaccgtgctcgcctttactttggtcgtctggttcctttcttccttttccttctcgggggtctgttccgccgaggacagttttctggcgcatatctgttccgtgctcaaatatgccttctatcccatggggattaccgattggcgggccgcctttgccgcggtcagcgggctcatcgccaaagagaatatcgcagggatgctctccgtgctgtttcccgaaggggtgcatttttccttcccctcggcgtgcgcttatttaacttttatcgctctgattccgccctgtatctccgcgattgccgcctgcgcgggggagctcggcagaaagacggcttggggatatgccgctttacagacgacctttgcgtttctctgcgcgtacctcgtttggtttttcctttcgggaggagcgcccgtcgctttcgccgcgttgtcggtgttcggagcctattcgctcggcagaaggctctgcaaagggcgcggaaagaagaaaaaattaaaaatacgggaaaatataagtgaaagagtttatcgcggataaaccgcaaagattaaaagaatataccgacaatacttacgcgcagggttcgtttttctggaattatctgataaaaaacagagagatccgcgtcaacgggaaaaaggtcggagaggatatcctcctttcgacgggcgataaggtcgcttactatctcccgcccgccaaggagaaaaaacctgctttttatatcgtttatgaggacgaaaacgttctcgtcgccgacaaggaaagcggcgtcaattcggaagcggtgtttgcggctttgaagcgggagagagaatgtttctttctacatcgtctggatagaaacacctcgggcttgctcgtttttgctttgaaggaagaggcggagaaagagctcctcgccgcatttaaggaacggaggatagaaaagagatattgtgcgctctgtttcggaaaattcggaaaggaggagggaattctcaccgcttatctgaaaaaagacgagaataaatccctcgtccgcatttacgacgctccgaccttcggcgcggaaaaaatcgtcacggaataccgagcgggggaacgctgcggtgagtttacaaagacggaaattctcctgcatacgggaaaaacacatcagatccgcgcgcatctcgcgcatatcggctgtcccgtggcaggcgatacgaaatacggagataaagaaaaaaatcggaaatataacctcacccgtcaatgtctcattgcaaaatcattaaaattttctctcctcggaaaactcgcctatctcaacgatttgaagttcgtttctcgttttgaattaaagatcccttgcctcccgacttgacgcgggaggcgctttttttgggattaaaattaacttaagtaaaaaaaatttttccaaaaatacctccgaatacttgacaaataattatgaaagtattaaaatacgaatagttgttcatatatataggacggtgaaattatggaaaaagaaaattgcggatatgaaagggagcacgaggaagcggtaaagcgggcgaaggagcgcatgccgaacgaagagaatatcgagagggtatgcaatactttccgagtcatcggggagccttcgagaatgaagatcgtgcttgctttgttgcagggagagatgtgtgtttatcatatcgtggaagcgtgcggagggacgcagagcgccgtcagtcatcagctgagggtattgaaggacaatcgaatcatcaaatcccgaagagacgggcagaacgtgctgtactccattgccgacgaacatatcgtaaaaattatacaaatcagcgaagaacacttgaattgtaaattggagggctgacatgaaaaagactttgcagttaaagggactcgattgtgcggcttgcgcggcggaattggaggaggaactcgcggctacggagggagtgacttccgtttccgttaccttcgtcacgcagaaactgaccgtggaatgcgaatccgaaaaagtcctcgcgctcgtcaaggataaagccaatcactttgaagaagtgcaggtggtggaggaagcggctccgacggtaagcgcggaggaagacggaaaaattcttttgcatctttcggggttgcattgtgcggcctgtgcgatggatttagaagacgaactgagaaaaatcaagggcgtgaagtacgtacaggtggatttcgtctctcagagtattctgttggacgcggagacggatgaggcggtgcggaaggtcataaaggccgcgggaaaattcgataaggtgaaagttttggacggagacaaggcagtacccgaaaaggaaacgcatttcaaggaaattatcgagatcgcggtttccaccgtatttttcctcgcgggattcctgctcgaacatttcgcttcgggaacggttgcgaaaatattccgctacggcgtatttgccgctgcctatcttatcgtagggtaccccgtgctgatttctacggcgaagaacatcgcgaagggaaaagtatttgacgagaatttcctgatgaccgtcgcatctgtcggcgccgtttgtctcggccagctcggagagggcgtcgcggtcatgctgctgtatcagatcggcgagcttttgcagggaatcgccgtcggttcttcccgacgttccgtatccgatctgatggatttgaaaagcgaatcggccactctgctcgaaaacggagaacaaaggagcgtcaagcccgaaacgctgaaaatcggggacgtcgttttggtaaaggccggggaaaaggttcccgccgacggtgtattaatgagcgagaacgcttctctcgatacgaaatcccttacgggagaatccgctttgaaagaagtcaaaaacggcggggagcttttgtcggggtatatcaacgcgggcggcgtatttgagatgaaaatcgttcgcgcctatgaggacagcgccgttaaaaagattctcgatctggtggaaaattcttcctccaaaaaggccgcgcccgaaaaattcatcacgaaattcgcaagatattatacgccgatcgtctgtattgcggccgcggcgctcgccgtgattattcctttgattcttggacttgcaaacggaggcggttacggaggatatttccgtcgctggataggaaccgcgctcaacttcctcgtcatttcctgtccctgtgccctcattatttccgttccgctcacttatttcagcggcatcggaagttgtgcgcggaacggtattttggtgaaaggggccacgtatctcgatacggcggcgaaaattcgggccgttgcgttcgacaagacgggaaccctgacggaaggaaattttgccgtctgcggcgtacagaccgcggacggtgcggacgaaaaggaagttctggcgctggcggcggccgcggaagcgggatcttctcatccgattgccaaggcgttcaaagagatcgattgtgaatataccgcggaggatatccgcgaagtggcggggcgtggaatttcggccgtattgaacggaaaacctctgttggtgggaaacgccgcgcttttgaaggaaaaaggaatttcggcccccgaatcggacagtccgtatacactgatctatgtggctttgggcggaaaatatctcggccgcatcgaaatcggcgaccgactccgtgcggaggcgaaagaggcgatttccgaactcaaagcactcggtatagagcggacggtcatgctgaccggcgacagccgcgcccgcgccgaaaaagtggcgggagaattgggaatgtccgaggtaaacgcgggacttcttcccgatgagaaactcgaaaaggcggaaagcctcaaaaaagacggcgctttgatgtatgtcggcgacggaatcaacgacgcgcccgtcatggcggtggccgactgttccgtttccatgggaaaactgggaagcgccgcggccgtggaggcctctgatctggttctcgtttccgacaatctcaaagcgattccccgcgggattcgcatcgccagaaagacgagaaaaatcgtcaccgaaaacatcgtgttttccatcgccatgaaagcggcgttcatggtgctcggcgtggcgggcgtaatgcctttatggctggccgtgtttgcagacgtcggggtcatgctgctcgcggtgctcaattcgctccgtatgcgcatgaaaattaagggcgaggggatttgaaaaatttgtatttcgttttacggcggacggcttcggccgtccgtttcttttcggaaaactctttacagatcggacgtaaatatgatataataaaaacgctatggaaacaaatatcggaaaaacacaggtaaaggacgcccaagccgtggccgaaatgtatcgcgaaggccgagcgtttctgcacgcttcgggcgtggatcaatggcaggacggttatccgagcctttcggacgttttacaagacattcaggacggcgtttcctatcttctgaccgtaggcgagatccccgccgcgagtatggccgtcgtcgaaaaggaacccgattatgacgacatttacggcggcgaatggctgacgggaaaaagcaaaaactacttcgccgtgcatcgggtctgcgttgcggacgcattcaagcgccgcggactgacctccgtgctttacgattttgcggcgcggctggcgctttcatccggacgggacagcttgcgcgcggatacgcacagagataacgcggcgatgcgttcggcgctcttgaaaaacggattttcggaatgtggaatcatttatcccgcgtacggcggggaacgcattgcttatgaaaaaatcatcgaggagaaagaatatggagaaagaacaaaataaaaagcggttggtagtcgcgacgggaaatatccataaacttcgggaaattgcggagatttttcccgaatatgaagtaatttccggcaaacaggccggcttttcggaagaggtggaggagacgggtacgactttcgccgagaatgcaaagctcaaagcagaagccgtatcgaaggcgctgcactgcattgcccttgcggacgacagcgggatctgtgtagaggccttggggggcgctcccggcgtatacagcgcccgctatgcgggcggacacggagacgataaggcaaaccgacttttgctccttaaaaatatggagggcgaaacaaaccgcagggcttatttcgaaagcgccgtcgctctcgtgcttcccgacggtgaatgtctcctggcggaggggcggacttacggaaaaatcctctttgaagagacgggagaaaacgggttcggttacgattgtattttcgagagcgacgatttaaaaaaatccttcggcctcgcttcggcggaagaaaaaaacgccgtctctcaccgtttccgagcactcatgaacttgtcggatatgctgaaaaaagttttataaggggagattatgaaaaccatcgtcgttatatccgatacccacggacacagagcgggcatcgaaaaactgaaaccgctgtttgcagaaaacgattatatcattcatctcggagacggcgcttccgatatgcgggatatcgtgaacgcctatcccgaaaagacctttgtgtgccagggaaattgcgactttttttccgctttgcccgaaggcgaactcgaagtggaaggcgtaaaaatttttttctgccacggacataaataccgcgtaaaggccgatttgtccgctttggcggaggaagccgcgcgccgcggctgtaaagcggctttatacggacatacgcacagagctttgatttccgaggaaaacggagttttgctggtcaatcccggttctttgcgctatcccgcgggggagggcggaagttattgctatctcactgtaaacggagacaaaatttatcccgtcctggtaggagaatccgtcttttaacggttgggaggataaatgaggaaaggtttgactgtttttgcagctgtctttttggccatatgtttcgccgtcggatgtgcaggtaccgcagaaagagacgacggagaatcgggtgattttgcttcgcaacaggactcttcttccgaagatccggaaatctcctttgaaagttcggggatttttacaagcagttcttcggaaaatattttagacagctcttcggcttctctctcggaagacagctccgaaagtttttcggatagtacctcggaaacttcttctgatatttcatcggacagcagttccgaagtttcttcggatagctccgcgtcgtcttcacaggagagcagcacacccgcgcaagagaaagtacatatcgtttttcatcgaaattttgaaccgctcggcacggatattgttttttccgtctcgcagtttccgggaatactcaacagcgaagcggtagaaagagaaatggaaaaatcggtgatgcgggggctgaaagacaaatttttgacggagacgaatgacgaagaaccgctctttttcgtttcgggctgggcttacgatgaagaaggaaaagattcctttgaaggaacggtgcaggcacaggaggaagaactgcacctgtatgccgtatgggaacgctcggcagagtattgcgaaattgctctcataggcgagaatacggagaatatcggaacctattacgggcgaaggggtacggtgctgacaaagtcggccgaagaaaaacttctggctgtcttttccgcatattacggaactttggggctgattgcagaaggacttgaaacctcggacgggaaaaagttcggtgcgggagatgtcctcgaaacggatatgcaaatttttgcgcgcttatccataccgaaagaagggaagaaaaacgaatgaaggacgaaaaatatctcaaattattgtcggtacagtatccgagtgctgctcttgccgcgcagcagatcatcaaattatcaagcatcctgaacctgcccaagggcacggaacatttcgtttcggatatccacggcgaagcggattcttttttgcatgttctaaaaaacgggtccgggtctatccgcaagaagatcgacgacgaattttccgacgaattgagcgaaggggaaaagagagagcttgcgacgctcgtctattatcccgaagaaaaattggaaattgcagagtccgaaaaatccgatttcgacgcttggtgccgaaaagaaatattgcgattgatccgcatgacgcggcgcatcgcgtcgaaatattccaaagacaaactaaaaaacgcgcttcccgccgagtttgaatatatcatggaagaactgcttacggaaaaggcggagattcccgataaggaggcttattataacgagattctccgcgcgattataaagacccgacgggcaaaggacatcatcgtttccttttgccgcctcgctcagagattggcggtggaacggctgcacgtcatcggagatatttatgatcgcggtgcgggagccgtcaccgtcatggacgcgctggaaaattatcattccgtcgatattcaatggggaaatcacgatatttcctggatgggcgcggcgagcggttcggatatctgtattgccaacgtcgtccgaatttccgctaaatacggaaatctgtccactttggaggacggttacggaatcaatctgattccgcttgaacgtttcgctttcgacgtatataaagacgacagatgtgaacggtttctgcccgaaacggcggaggatgcggatgaacgaaaaatgacggcaaaaattcataaggcgattgccgtcattcagctgaaattggaaggtcagcttgcccaaagacgtcccgaatttcatctgtcggagagagtttttctggataaaatcgaccatgaaagaaagactgtctgcatcggcggaaaaacatattccctcgtggacgattattttccgactgtgaatcccgataatccctatgaattatcggaaggagaaaaaagagtctgtgcaaaactgcgggaagcgttccatggcagcgaaaaactccgcagacacgtcgagtttttgttctcccgcggaagcatgtatcggatttataacggaaatcttctctatcacggctgtgtcccgctcgatagggacggcagcttccgccgcgtggaaattgcgggaaagatctatttcgggaaatccctgtacgacgcgctcgaaggctggatacgcaaaggcagatattcgaccgacgaaagggaacggcagtacggaagggacatcatgtggttcgtttggtcgaatgagaactctccgctttacggaaaggataaaatgacgaccttcgagagatattttcttgcggataaagagagctatgcggaggaaaaaaatgcctattatcgcctgtgcgatgatgaagagacggtggagcgaattttccgcgaattcggcatcgatcccgacaaagggcatatcataaacggacatgtacccgtaaaggtaaaaaaaggggaatcgcctgtacactgcggcggaaaggtcatcattatcgacggcggattttcccgcgcgtatcagaaggttacgggaattgcgggatatacattggtatccgattcccgaacggtaaagctcattgcacatgaaccgttcgtttccacgcaagaagcggtgctcaacgaacgggatatccattctgcctccgaagtgatccgcaaatcggaaacgcggctgagagtcaaagacacggatacggggcgagaaatggaagagcgcattgcagacctcgaaaagctgctcgaagcctatcggtgcggcgcgttaaaggagagaaactgacgaccgtaaacgataagagtccggagaagaaaacaaaaaaacagataattattgccgaaattgtgaggagatgttgagatgagattagacggattcggtttaatggtaaaaaatatgtccgaaatgattcgtttttatagagatgttttgggctttgaaattaaagaaaaagaagatgctacccatgtgtatttaattaaggataatactctgtttatgctttacggcagagaagactttgaaaaaatgacgggcaagagatatgaatatatcggcaaaggactgaacgggcattttgaaatcgccttatatgtcgatacttttgaagaggtcgataaagtatacgaagaagccgtttccaaaggagccgtccccgtttttgaaccctcaacggagccttggggacaaagaacctgttatatcgcagaccccgaggataatcttatagaaataggctcgtttaacaggccttttgaaagatagacttttggagtataaatacaaaaaccacggaagtttccaaaatttccgtggttttattttgatgtttcagaaaattaaattatatttccgtatttgttttttcgctttcagtcttcatgaatttcaatgccccaaacagtttcgtaaatcttgccgggagccaatttattcatatcttcttttgtttcgagattagtaataattccgtcggtagcgggcagtatcgaccaaggttcgaggcagacgtaaggagcgtcggtctgaggggtatgccagactccgagatagcggaaaccagggtaatcgagtgaaatataacgggcgtcggtcttgctctttaaggctacgccccgacaggtattgccgagaataacggcgtcattatcgaacagctcatgactgagctgtaaaacggttccgtccgtgaggggaagggaaaatttttctcccgtcatgaatttgtcctcggaaaggggatagaaaagcactttggtcttttccgaaaattcgagataataatcttcaaaagcccccgtctttccaaagggaatattgaagcccggatgtccgcccaatccgaataagaggggcttttcatccgtattttcgacctgataggaaatattcagccgagcacctctgatttcatagcaaatcgtaaagacaaaatgaaaaggatattgtttcaggctgtctacgtcgtcggtgagtttgaataccagcttggtagcactgcgctctgtcagcttgaaggcccgataacgcgcgattccgtgagggagaatggaatactcctgaccttcgtatgtatacgtgtttttatacattcttccgattgtaggaaagagattatacgccctgcccgaccaataggagggatctccctgccaaagatattcggtatccgtctttttggaataaaccgattgaagctgggctcccgaagtatctaccgcaattttaagtatcttgttttcaatcgaataaatcatcttcttctccttttaccgcttttaccgtgtcgtttatttcccgacagttatattttatcacaaaagaatacgtttgtaaagagggagaaggaaaatttcgaaaaaagtcgtcccgaatattttcgggacgactttactcagaaaacaatcctgagaagactttccaattgtaaaaatattaatcgatcggtgactgtcatctttgatttctggcaggaaaaaccgattactacgatttctttccgcgtgcggatgggaaagtaaatcgctttagcttcccgaagcgtatccgttccgcggcccgccgttttttcgttcttacggcaccattccaaaaccgcccgttcattaatttcgtcgaaaaattttatatcctcgccgttccatgagacggttacattctctccgtccgtaatcgagcagctccgttcaaaagctctcgcgagaacttccgctattttcatagccaaggaatcagtgggttttctttcggcggccgctcgttcgatgaggtcggaaatatcgagaatacggtttgccgtcttatatttttgcaacagcttattccgattgaaaattctcgaaaagaaatcccgaacggggcgttttccggagaaaaagtgctgattgtcgggaacgatgagcaattctatatcgggaagccgtgcgataaatttatcttccaacccgaccttctttccgacagactgccaagtttttccgatgaccaaattggtcactcctgcgagctttacataatccgcgactgtctctacgacgtcttcgctgtatttgacgatcatgttgccgcccatatcgcgcacgagcgccatgtggcgtttcaggttggccgctgcctcgtcgctcaaagagccgctcgtttcgacatacatcgccgaaaatttacagtgatacgcctccgcggtacgcgcggctacccgaatatttttctgcgaagaaggggaggggctgattaagaccagaactttggttttcagctctccgttgttcgtctgtttttcgatacgatccgcgctgcggcgcatagaaagctctcttaaaacagacagattgtccgttttaaaaaagttttcgagtgcggtgactgcccgattctttttataaatcttgccttcccgcatgcgctcgataagctcggtcggctctatgtcgataagcgcgacctcgtccgcatagtcgaatatttcgtcgggaatacgttcgtttacgtccacggacgtggcggaatcgacggtgtcgtgcaatccttcgatatgctggacattgacggtcgtatatacgtttataccgttgttcaccagctcttcgacgtcgagataacgttttgagtttttgcttccgggagcattggtatgcgccaattcgtccacgagcaacaactggggacgccgtttgatcgccgcatctacatcgaactctttcagatcgattcccttataggaaagttcttttaaggggagcctttcgagtccctctgccatttttaaggtttcggggcggtcgtggggttccaaatagccgacgacgacgtcgactccttcctgtttcgcttcctgagcggctttcagcatggcgtaggtctttcctacgcccgccgagtagccgaaaaagatttttagcttacctttttccattttataaaagtccgtccaagcttaaattgactaacagtacatttactcgtttttgaccgaatattcccaaaaatctgccttccgtatactttttaataatggcgtttacatcgtcttccgtaatcagaacgggttccgtaccgttcttttccgcctcttcctgtgcaatcttattgcgagcagctacgattacaggtacttggaagtaagccgcttcgggagagatgtgagggtctacgccgctgccgccggaggtgacaaggtcggaggggatagcttccgtttcggtatagccgattgctgcaagtttttctttccgttccgcgattctctcttttacaagttcctgatactcgtcgctttcgggggaaaggttggtaggagcaccggaattcactcttccgaacatatattcggcactttcatagctttggccgataagctcgcttccgaaaattctttcctctccgttgggcagagtgacgacaatctgagagccgttggcttcataagggtaagctgtctgagcgacgagcgtaaagctcagaggataaacgataccgcagagaaacgtaaagatcaacaggcacaatatagaagctctcagcatttgaaatcttttctttttcgccggcagaggctgttcataaatattttccgttacattttgtgtgctttttttcatgataaagacacctccttacaggaataacgtcagcagcatatcgaacagtttaatgaatataaacggagcgacaacgccgccgagtccgtaaatgagaagattgtttttcagcatttttccggccggctgttccttgtacttgacgcctctgagcgaaaggggaatcaatgcgacaataatgagtgcattgtatatgacggaagagaggattgccgtcgtcgggctggtcaggtgcatgaaattgagtgccgcaagccccggataaatcccggcaaacagtacgggaatgatagcgaaatattttgcaatatcgttggcgatagagaacgtcgtcaacgcgcctctcgtcatcaggagctgtttaccgattctgacgacgtcgatgagctttgtagggctggaatcgagatcgaccatgttgcccgcttctttcgcggcctgcgtgccggagttcatggctaccgccacatccgcctgagcgagtgcgggagcgtcgttggtaccgtcgcccgtcatggcgacgaggtgaccttccgcctgcaatttcttgatgagggcgagcttggtttcgggagtagcctccgctacgaaatcgtcaacgcccgcttccgccgcgattgccgccgcggtcatagggttgtcacccgtgatcatgatcgttttgataccgatttttctcagatcttcgaatttttctttgacgccttccttgacgatatctttcagatagataacgccgagaactttttcattccgggcaacgacgaggggcgtcccgccttcgttcgcaactctcttaacagccatcgcacattcatcggggtagacgccgccctgcgcttttacgtaggcttcaatcgcgtccgcgcttcctttgcggatatgctcgtctccgatattgacgccgctcatgcgggtctttgcggagaattcgataaagttagctttcaatttggcaatttctttgccgcggaggtcaaatttatttttcgcgaggactacaatacttcttccttccgccgtttcgtccgcaatggaggaaagctgagcggcttccgcaaggtcgcgttcggaaatatctccgacggggataaattcgctggcctgacggttgccgagggtaatggtacccgtcttgtcgaggaggagaacgtctacgtcgcctgccgcttcgattgcacggccgctggtggcaaggacgttcgccttattcaatctcgccatgcccgcgataccgatggaggaaagcagggcgccgatcgtcgtaggagcaagacaaacgagcagagcgacgatattggtaagactgatggcggaaccctgtcccgcctgatttaccgcaaatttcgagaagggcaaaagggtggccgatacgatgaggaagataatcgtcaaagtgacgagaagaatctgcaacgcgatttcgttgggggtctttttacggcttgcgccttcgaccatggcaatcattttatcgaggaaactctttcccgcttccgccgtcacgcgaataatcagccagtcgctggttaccgtagtgccgcccgttacggcgctcctgtctccgcccgattcgcggatgacgggggcagattctcccgtgatcgcgctttcgtctacgctggcgacgccgacgatgacttcgccgtccatggggatttgttcgcccgctttgacgaggacgatatctccgggtttgagttcgttgctcttgacttccgtgtattccgattcatagtccgcttctttcaacttgcgggcgatgacgtcgcgacgcgcctttttcaagctctccgcttgggcgcggcctctgccttctgcaattgcttccgcaaaattgccgaacagagaggtaaaccaaagaataatggagataccgaatatgtaccagcttccgccgtccttgattccgcccagtgaaaggaaaaacagaatcatcgtaaagattgcccccagatagacgacaaacatgacgggatttttaatctgtaccttcggattgagttttacgagcgattgaagtgtcgcatcgagaacgatttttttattgatcatctggcctttttggagtttttcttcggccgtgattttctttttttcattatgtttcataaattgcttttacctccttaaccgacaaattcagcgataggtccgagtgcaagtgccgggaagaagctgagtgcgccgacgataagaatgacggcaatcacgaggcctacgaacatggcattattggtggaaagcgtaccatccgactgaggaatcatcttcttgtttccgaggcttcccgcgagtccgagagccgcgaacatgggaacgaaacgaaccagcagcatgacgatgccgcccgtgacgttcgtccaaggggtattggcgttgaatccggcgaaagccgagccgttgtttccggccatcgacgcaaatgcgtagaggatttccgagaatccgtgtgcgccgctgttcgtcagccattcgggcgcttctttaatcattaccgtagatgccgttccgatgagcaggcacaacacgggggtgagaatgatgaggcaaaccattttcatatcatagctgccgatcttcttgccgatatattcgggcgttctgccgaccatgaggccgccgatgaaaacggtcaaaatagcgaaagcaatcattccgtacagaccgcagccgacgccgccgtagacgatttctccgagcatcatgaggaacatggggatcataccgccgatagaagtgaagctgtcgtgcatcgcgttgaccgaaccgttagaagcagcggtcgtagccgttgcccaaagcgcggaagtgcctacgccgaaacgagcttcctttccttccatattgccgaggtacttgactccttcgggcattgccgcgccgacgaattcaaatacggtacagacgataagtgccgcgataaagaggatgctcattaccttcaaaagtgcgataccctgatccttttccttgactgccgttccgttttcgccgcgcatcttcaccgcttttccgaaggtgaagcaaagtcccgcgggaatccagagcagggaaagacattcgatgaggttggagaaaggggtagggttctcaaaaggatacgcggagttgactccccagaaaccgccgccgttagtgaataactgcttaatgataatctggctggccgccggtccgagatataatgtagaggcttctccgttcaaagccgtgtaagagacggaaccgctcatcgtctggggaacgccctgagaaacgaggataaaagctccgacaaagcatacgggaatcatgaagagggtgactctcgtaatatccgcccagcagttaccgatggttttcttctgtctgccgacgaagccgcggataagtgcaaagagcaccgcgatacctaccgcgccggagacgaagttctgcaccgtgaggcagatcatctgcgagagataagaaaggcccgtttcacccgaataggcctgccagttcgtgttggtcacgaagctcgcggccgtattgaaggcgaggtgccagctcattccctcgatatgttcggggttcatcgtcagaaatgcctgaagcatgacgacggcaataaagaaaatcaggctgaatacactaaacaaaagtatgcccaatgcatacttcttcgctgtcatttcttctttcgggtcaacacccatgattttatagattccgttttccgtggccgtaaaaacttttttggcaaatacgggttcgcctttataaattttgtaaaaggctctgccgaagaaccagccgcctccgatgaggagcacgaaaaacagaatatcctgcaagacggtaaaaaggatttccgtcataaattacctcctttttcgatttggatatccgtatcgcattccggaagaacggtaatttgtttgatcagatcaagccgataaaaaaccgttcggtcccggtcgtctttcagtttcagaaagccgtccatgccgtcgatgacgacataattcgcggcggctactcctccgttctgataagctccggaaagaaacgcgatacgcacgtgttttctttttagttcattgataagttccgacatgttaatctcctcttgtgtgtttacgtcttgtcaccgttgaaaagagcataaaacagatagcctaaaaggcctactgccaatatgccggcgacgattgtcacgacagtcatctcttttttacctcctccgatttcaggccccacgctatatttcccgcgcctttataccaaaaaccgcaaactcggtcgagattatccgaagcggctttgaaggtctggtccatatagtaggcgactctgtaaaatttcgaagcctttatcctgtcgccttccttttcataagaaatgccgagcaagttataggcttcgggattttccatgttttccgatacggctttccggagaatacagcgggcacggaaattttctcccgcgcggatcgcctccgcagcgtcttgaagaagagcttcttcccgattctcttccgcctgcgattcgttttcgcggctgtagaacgtttccggtcccgttttacgggatatatcggctccgtttttgaggaattttatacctgtcatcatatagtcgtacctcccttcttttttcaagtgaaattataaacgtttttacattaaaagagcgtttaatcttcttcgtcgaacattaattttatattaagatatattaacggacagaaaaaagcgggcctgccgataggcaagcccgccgagaagcggaaaatatttactcgtttggaaaaataagaatcccatgcagagggaaaactcatattttattcatgcgatatcctacgcccacatcggttcggatcagctcctgagaatagaggtctttttcgatcttgcgccggattcccgccataaatactcgaagcccgttggcatcgtttccgcccggtccccatactttggtaataataaaattgtgcgtgagcgtctttccgacgttttgagcaagaacgcagaggattttatattcgtaattggtcagatgtacttcttcgccgtcgagatatacgctgtgcgctacataatcgatttttaattttccgttgataaaagtgccgctttgttgctccgccgcgctgctatggcgcaaagtggcacgaattctcgccatgagttcggcggtggaaaagggcttttgcacatagtcgttaattcccgcgtccaaacatttgattttttcgctttcgtcgtcgcgggcgctcacgacgataataggaagattttcagaaaagctgcggaccgtttcgacaacgttgattccgtccatatccggcaggcccaaatcgagaatgattaaatctacgatgttttttacgacgaagtcaattccttctctcgctgtaccgaccgcgtttattgtatgattttcctgtttgagcgcgactttcaaaagattttgtatcgctttatcgtcttcgacgatgagtatattagccatttttgtcctccatgggcagattaaattcaaatatgacgccgccgttttctccgtttcgagcggaaatctgtccgccgtgcgccgttacgatcaatttacagatagacagccccagtcctacgccttcgctgtttctgtcacttccccccgtgtagtacatttcaaagatatgcggaaggtcttcttcccgtatgctcgctccgtcgtttccgattcgaaagacggcattttttcccgtatcccaaacctttatccagatatttccatcctcgcttgtgtgtttaacggcattgctcaaaatgttgccgattacctgcatgatcagtgtggcgtccatggggacaaccagcatttcttcgggcatatcgtagtgaatatggcgttttcctaaaattccgctcacgtttcggaccgcctgagggat

SEQ ID NO: 4482 - DNA, 19666 bp, Unknown
  16S sequences of unknown bacteria
tgaccccggcctggtgcatcggcctgatgcgggactgtttgtcccagctggaggagggcagggcagtgcagtacctgcgcaccgtcaccccgctgccctcgggggacatcatgggctatatgccggcggcggtatccggggcattcggagccaaggtcatcaccgtgttccaccacaacagcgaaaagggcctgccctcccatcaggggagcgtgctgctctttgacggcgaaaccggtaccctccaggccatgctggacggcggcgccatcaccgagatccgcaccggtgcagccagtgccgttgccaccgatctgctggcccgtcccgatgccgaagtgctgacgctgatcggaagcggcgcccaggcccggagccatctgctggcgatccgggagatccgcaagctccgggaggtgcgggtgtggagccccagcctggagagcgacacccgttttgcccgggagatgggcgagctgaccggcctgccggtgcgcatctgcgcgtcggcaaaggaggccgcggagggagcggacattctctgcaccctgaccccgtccaagaccccggtgctggagcgggaatggctgaagcccggcgcccatgtgaacgccgtgggagcctgttcggcggacgcccgggaactgaccggcgagctggtgcgggacagcgtcttttactgcgacagcgtcgagtcggtgatggcagagagcggcgacttcctgatcccgctgcgggaggggctctttggagaggaacatctccggggcaccctgggcgaactgctgctgggcaggaagcccggacgcacctcccctgaggagatcaccgtctatgaatcgctggggctggcagtggaggacatcgcctgtgccgaagccctctgccgtcccgccgcgaaactgtaaccggcaggatagaaaaacagaaaaaataccgccctggcagcaccgggacggtattttttatataagcgaaaggtatggcaggaaggtgccgagcggtgtgatgtccggcgctttcctatttatataggggagggctgtccccggcgctgtgtgccgggtgcggggcggaaccggggatcagtcccggtgctcgtccaggtagcgggcggcgcagtaggcatagagggcagcgccccggtacagcaccgactcgtccacgatcatcttcgggttgtgggcgccgcaggtatggccctcggcaatgctgcccacgcccagatggaacatggcagcggggatctgctccgccacggcggtgaagtcctcggtgccgctgagcccggtgagctcgatgacatcgccggcgccgaacagctcggcacagtagccgctcactgcctcacagactgccgggtcattgtagagggagggcatgccgtagacaaattccacctcggccttgccccggaaggtggcggcagtgccttcgcagatctccttgacccgctccttgaggaaggcacgcatctcccggtcagcggcccgcaccgagatctccacggcacagctgcccgacagggtattgcagctagagccgccgtgaatggtgcccaccagcaccatggtgcggtcgtccatggcgacctcccgggccagaatctcctggagggcgatcaccgcatgggcggcaatgttgatggcgtccacgcccttctgaggagtgctgccgtgggcgtccttgccggtgaaggtcaccctgatggcatcgcccgagaagttggcgacacccggcttataggagatcttgcccgcagcggtgtcctcgccgccgcccaccgagatgtgcaggccgatgcccgcatccactctggggttctccagcaggccgtgctcgatcatatccttggcgccggcgagcagttcctcggcgggctggaacatgagcttgacacagccgggcagttccccggcgtgttccgagagcagccgcgcggcggcaagcagcatggcggtgtgggtatcatgtccgcaggagtggcagtggccgttctgtgccgcaaagggcagtcccgattcctcggtcatgggcagggcgtccatatcgccccggagcaggaagcacttgccctttttggggtcaccgatgacacaggtgatgccggcctttccgcagcggacaggggtgaggccgtattcccggagttttttctccacaaaggcagtggtctggggcaggtcaaagccggtttcggcatagctgtggagggtgcggcggttttcgatgagttcctcccggagttcttcggcacggttcaggatcatagtggcgttcataatcagatcttcctttccaatatgtagaatttccagtgatttatacagaatcccggtggattcgccatcggcgatagaactgttttgcgggaatcatggaaaaatccctcctctgcggcaataaaaaaacggcttttgtccctgcaaacgggacaaaagccgtagcttctgcggtaccacccatcttgacgcctgaaattgaaagcgtccgcctcagacacgcccaacagcgtgtgcgcccggataacggcaggccagaccgtctgattttactgggccggagaaaattcctccggcggttcgctcagccctcgcgggtccattcgtccgggggcctgcggctgcacttgcaccaacggcagctctctgtgcgcggtctccccggattacttctcccggtcaaaggtttctgtggctgtttgatttgccttcattatagaaaagcgccggggctttgtcaagtctgttttaatggctttttcggggagaaccggcaaaatatttatacaaatcagaatattatatagaaatattacggattttctcagcggttgagcagataaatccccagattgagatacccggctacccccagccagagcagatagggcgccagggccagggctgttttccagtcgatggcggcagagcgccggatcaggtcggccaccagcaggaacagcacaatgagcaccagcagggcagccagccaccagccgcccaggaagaagagaagcggccagaggaagttgagcgccagggtgagcacatactcgcccagggcttcccagcgggcaggggaggaggacttccagatgcgccagctggcataccccatgagcaggtagagaatggtccacaccaccgggaatacccagccgggcggggcaaagggcggttttttgagcagcttatagccggacatggcactgcgtgtgaaatatcctgccagtccgcccactgccagcggcaggaacagggcaggcagcagggaggagagcttgtgtttcaacggaagatcacctgctttcaggggagtatgggatatggatagtgtacgccgggaaatggcggattatgcaaatggaacaaaacaaaaatatacttaggctttctaattataaagagggctaaaaatgcgaataatttgtgaacttgcacattctttgattgacataattatttaattgcgctatgatagtttggtagcaaacaatgtgacacagaaaggagtttgtccggattgagccataaggaaacgatcctgtattccctgaagatgatcgacaatttggtgcggaagctgatggaccggcatattactgcggataagcagggactgacgattatgcatacctggattgtgggttttctctacaataatcctgaccgggcggtataccagcgggatattgaacgggaattccggatcaatcgggcgacggtatcaggcatgatctccctgatggaacagaagggactgatccgccggctgagtgtatcccatgatgcacggctcaaaaagctggagcttacccagttggggcgggaactgcatgaaaaacaggtccgccggtttgaagcactggaaggaaccatggaagatgccctgactccggaagaactcaggcagctgtttgtcatcacagacaaactgcggcatactctggaaacactggttcagaatgattaaaggaggggaatgatccgattatgacgaacacagtcaagcagctgagcaaaagcgtgcgggagtataagcgggatgccatcctcactccggtatttgtaatcggcgaagttgccatggatgttgtaatcccgatgctgatctccaatctcatcgattacggcatcacacccggcaacatggactacatttacacggtgggattccagctggtagttgcctgtctggtggcactggccctgggagttctctcgggccggcacgcagccaaggcttccgccggttttgccaagaacctgcgcaaggatatgtactacaatgtacagaactttgcgttttccaacattgataagttttccacacccagtatcatcacccgtatgaccaccgatgtcaccaatgtgcagatggccttccagatggtgatccgtgtggcagtgcggtcgcccatcatgctgatttcggcactgttcatggccttccgcctgggcggcaagatggcaatggtttatctcattgtcattcctgtgctgggcttcggactctacttcatctccacttcggttgccaagatcttcaagcgggcattcaagcggtatgataccctcaatgccgtagttcaggagaatgtaagcggtatccgggttgtaaagagctatgtccgtgaggactatgagatcaagaagttcaccgatatgtccgatggcatgcggcaggacttcaccaaggccgaaacccgtctggccctcaatatgcccatgatgcagctgtgtatttacagcaccatgacagccatcttctggttcggttcccggttcattctgtctggcggcatgaccaccggcaacctgatgagcctggttacatacaccatgcagatgctcaactcgatgatgatgctctcgatggtattcaccatgatcgtaatgtcccgtgcttccatggagcgtatcgcagaactgctccgtgaaacccccgacatccagagcgccccggacggcgtcagcgaagtcaaggacggcagcatcgagttcaggaatgtatccttcagctataagggcgagggtaccaatcccagcctgatggatgtgaacctctccatccgcagcggcgagaccatcggtatcatcggttccaccggttctgccaagagtaccctggtacagctgatcccgcggctctatgacaccaccgaaggcgaagtgctggtaggcggcgtcaatgtcaagaactatgatctggaagcactgcgcaactcggttgccatggtactgcagaagaatgtactgttctccggtaccatcaaatcgaacctgcgctggggcgatgagaatgccaccgaggaagagatgatcaccgcctgcaagcatgctcaggccgatgactttatccagagcttcccggacaagtatgattcccgtattgaacagggcggtaccaatgtatcgggcggacagaagcagcgtctgtgtattgcccgcgcactgctcaagaagcccaagatcctgatcctggacgactccaccagcgcggtggataccaagacagatgccatgatccgggatgcccttgccaatgacctggcagacaccaccaagatcattgtagcccagcgtgtaacctccattcaggatgcggaccgcatcattgtaatggacgagggccgcatcaatggtatcggcacccatgaggaactgctccggaccaatgagatctaccgcgaagtatacacatcacagcagaagggaggagacgaagagaatgcccagaatgaatagtaccgcactgcgggacgaaaacaaggtcggcatcaagcatgtgaacaagaatgccctgagccgtctgctgaagattatcttctcggatcaccggggcgctctgattgtggtaatggtctgcattctgatcacagtattcaccaatgtagccaactccatgttcctgtccaccctgattgatgactatatcacccccatgctggcaagcggcagccgggacttctccggtctggaccgtgccatcaccactatgatcggcatctatgccgccggtattctggcttcctttacctatcagcggctgatggcctatgtgacccagggcaccatgaagaagatccgtgaccagatgttctcccacatgcagaccctgcccatccggtattttgatacccacagccatggcggcatcatgagccattataccaacgataccgataccctgcgtcagatgatctccatgagcatcccgcagatcttctcggctaccgtaaccattatctcggtattctgcgccatgctctataccagcattccgctgaccatctttgtgctgttcaccctggcgatcatggtgttcacttccggtcagatcggcaggcgcagcggcaagtactttatccgtcagcagaatgagatcggtgaagtaaacggctatatcgaggaaatgatcgaaggtcagcgtgtagtacaggtattctgccatgaggagcaggccaaggctgactttgataagaagaatgattccctctgcgaggccatgaccaaggccaatacctatgccaatatcctgatgcccgctgttatgagcctgggcaacctgcagtatgctctgatcgctctgctgggcggcgcgctggcgatcaacggcatcggcggcaccacactgggtaccgtagctaccttcatgaccctgagcaagagcttcaatatgcccatttcccaggtatcccagcagctcaactccattgttatggcgctggctggcgcggagcgtatcttcgacctcatggacgaggagcctgaaaccgatgagggcaatgtcaccctggtcaacgccaagttcgacaaggacgatcagctcatcgaaagcgaagaggaaaccggtatctgggcctggaaggttccccacaaggaggacgatggcttcgattatgtacagctcaagggtgaggtacggttctacgatgtagacttcggttacaccccggacaagattgtcctgcatgacatcagcctctatgcggaacccggccagaagatcgcctttgtaggcgccaccggtgccggtaagaccaccattaccaacctcatcaaccggttctatgatattgccgatggcaagatccggtatgacggcatcaatatcaacaagatcaagaagggtgacctgcgccgcagtctgggcattgtgctccaggatgtaagcctgttcaccggcaccatccgggagaatatccggtatggcaagctcactgccaccgacgaggaagtctatgcggcagcacagctggctggtgcggacagctttatccatctgctgccggacggctatgataccgtcctcaccggcggcggcaccagtctttcccagggccagcggcagctgctgtccattgcccgtgcggcagtggcagacccgccggttatgatcctggacgaggcaacttcttccatcgatacccgtaccgaagccattgtacagcagggtatggacagcctgatgtatggacgcactgtctttgtcatcgctcaccggctctccaccatccgcaacagcgatgttatcatggtactggatcatggacacatcatcgaacgcggcaaccacgagaagctgctcgccgagaagggcacctattatcagctctacaccggtgcgttcgaactggaataagcaagcattccccaaacttttacctctttatgaaaacatctccggagagaatttctctccggagatgtttttttatgcggatggttcagcgttggttcagtttttgaggaagtcacacttctggcactggcggagcagcccggcctgatcgtccttggtataggcgcccgaccaccggcagatgctctggagaatgggaacaactgtctttcccttttccgagaggcagtattccacccggggcgggatctcgttataggaatggcgttccaccagctcatcggcaatgagttccttgagggcggcagccagtacggcatcggtgatattgagcatttctccccgcagggcactgtaccgcagggtgcccttttcattgaggacgcagataattctcgacttccatttgccgccgaatacactgagcccatattccagcggacagcggatttccttttcagttttgggctgacgcatgattgatacctcccatgggaacaggattttctgttagatagaatagcagattggctatggaaatacaagcggatatgaaataaataagctgctcaggaaaagaatatccatatactatgaaaattataagatacttatagttttcatgatatattgcgggagagtggaaatactgatacaatgggaatatcgccggagcaagggctccgggaatccaaaaaactgactgatcaggaggaaacccctttatgattaccgtaactggtacacgcgaaaactacattgccgaaatgactgccgaccgcggcaccctgaacgccgctcactgcgatattccggtggagcagggcggacagaacgcctatatgcgtcccggcgagaccctgctctccgctctgggcgcctgcatgaacatcaccgcccggaagtatctgaaccgggacggcctggactatgagagcgtcaccgtcaaggcggagatggcacgggaaaacggcgtcaccaagatccgcaccaagctggagatccacggcgccctgagccaggccgataaggatcggatcatcgcggaagtggcctcctgcccggtatgcgagatcctgtccggctccatcgagctgggtaagctggactgattttccctccggcacctcccacagctttgcagcagaagagccctgaccagggctctttttgttttgccggaaaacggagcaaagaatggggaagtctgctcatggacagggcaggaatccgcctgctataataaaataaaaggagctgccctggtgacagcgtacagtcgcccgcatcatataaggagggaatacagtatgagcgcttcttcccgtgatctgtccataccggacggcctgatcctgtttctgccggcagtgccgggtatgctgtttctctatattgcggaggtgatcccccggatctgcgccggactggggctggagctggggctttccggctatgccctgctggaggctgtctttatcgggtgcgccctttccccggcggcggggctgccgctctactgctggtactttttccggaggggactggggagcaatccggtctatccggcgctgctctacctggcccagagtttcgcttccattctgggcatgacgctgctggtgcgcagtctcttgttccccgaagccccggcagaggggctgtccggcttcctgctgccgctgctcattgccatggggctgctcgttccactgatgaccggcatatccgccggaatctgccgcctggcgcgccgccgcatggggcgatagtctgtccggggcctgcctgagcgggtcccggtttttatagttttgcagtttcctctctctgtattcttcaaaaatgcggctgtttttggacaattttcagtaaaaaccaaaatattttgcaaaaacgctttatttatattgcagaatatgatatgataagcccaacacacctcacgccgtcgggcgaagcggcgtggattttttatgcaaggggactgatactatggagaaaaagatccgcaaggtactggtggcaaaccgcggtgagatcgcgatccgcatcttccgtgcctgttttgacgccagtgtgcgcacagtagccatctattccaaggaggacaagctctcgctcttccgcaccaaggcggacgaagcctatctcatcggcgagaaccgcagccctctcggcgcctatctgggcatcgaggagatcatcgcactggcaaagcgcaagaatgtggatgccatccaccccggctatggcttcctgtccgagaatgccgacttcgcccgggcctgtgaggaagcaggtatcatcttcatcgggccgcccagccagattctcgatcagatgggcgataagctccatgccaaggaagtggcacgccggtgcggcgtaccggtcattcccggcagtgaaaagccggtgtccggtgtggaggaggccgtgcgcattgcggaggaggccggttatccggtgatcctcaaggcggcagccggcggcggcggacgaggcatgcgccgggccgacaatgccgaggagatcgcccggaactttgagctggtacggaacgaggcccgcaagtccttcggcaatgacgacatctttgtggaaaagttcctggaggagcccaagcacatcgaagtgcagatcctcgctgaccagtacggcaatgtggtgcatctctttgagcgtgactgttcggtgcagcgccggtaccagaaggtggtggagttcactccggcctttggtatttccccggaaaagcgccagcagctctatgatgacgcagtcaagatcgccagggaagtgggctatgtcaacgccggtaccgtggagttcctggtggacaagcacggcaaccactacttcatcgaaatgaacccccgcatccaggtggaacacaccgtcaccgagatggtcaccggcatcgacctggtacgggctcagatcgacatcgcccagggcctgccgctctcccacccctatatcggcatcgagagccaggattccatcaagctgagtggctatgccatccagtgccgtgtcaccaccgaagaccccaccaacaactttgccccggataccggcaagctcaccacctaccgttccggcggcggcttcggcatccgtctggacgcaggcaacgccttcaccggtgcggagatcaccccgtactatgactcactgctggtaaagatcaccgcctttgaccgtacctttgagggagcggtgcgcaaggccaagcgtggtatgggcgagatccgcatccgcggcgtcaagaccaatatgtccttcctcaacaatatcctctcccacccgacctttgtagcgggcaagtgccataccaagttcattgaggagaccccgtccctctttgatgtcaaggagagcaaggaccgtgccaccaaggtgctgcggtatatcggcaacaccattgtcagccaggaggagggcttccagaagccaatcctggacaatccccggctgcctgatccggcttccctgcccgagatcacagcgcccaatctgcgggaactgctccgggagggcggcgcaaaggcactgaccagctgggtcaaggaccagaagaagctgctcatcaccgataccaccttccgggacgcccatcagtcgctgctggctacccgggtgcgtacccgggatctcaccgccattgccgagcccactgcccatatcctgcagggcgccttctcgctggaagtctggggcggtgccacctttgacacctgctaccgcttcctgcatgaatccccctgggagcgtctggaccagctgcgtcaggccattcccaatatcccgttccagatgctggtgcggggcatcaacggcgtgggctaccatgcctatcccgacaatgtcatccgggagtttatccgggaggctgcccgcagcggcattgacatcttccgcatcttcgactccttcaataaccccgaatccatgcgccttgccatcgaaaccgtcaaggagatgggcaaggtggcagaggtttccttctgctataccgacaatatcctggctcccaagtatgagaagtattcgctggactactatctgaagctggcaaaacagctggaagccatgggtgcggatattctctgcatcaaggatatgggcggtctgctgcgcccgctggctgccaaaaagctggtgactgaactccggcaggtgaccgatctgcccatccatctgcacacccacgacaccagcggcaaccagatcgctgccctgatgatggcagccgatgccggtgtggacattgtggatactgccatcagcagcatgagttccctcaccagccagccctcgatgaacagcctggtaacagccctggagggcagcgaccgggagaccggcttcgatccccggcagctgcagaagctctcggactactgggaggacacccgcaagtactattccggctttgaaggggacatcaaggtgcccgaaaccgagatctaccggtacgagatccccggcggtcagtataccaacctcaagccccaggtggaatccctgggactgggacaccagtttgaggaggtcaaggagaagtacagcgaggtcaatgacctgctgggcggtgtcatcaaggtgactccttcctccaagatggtgggtgactttgccatcttcatggtacagaacaagctggatcggaacaatatcctcgagcggggcaaggaactcaccttcccccggtcggtggtggactacttcaagggcatgatgggtcagagcaccttcccgctgccccaggagctttccgaggtggtgctcaagggcgaaaagccgctggataccctgcccagcaagctgctgcccccggcagactttgatgccattgtggaaaagctgcggaagatcaatcccgcggcgggactgcgccaggccattgcctactgcctgtatccccaggtggtggaggacttcctggctggctatgagacctatggcgacatcagccagatgccttcggacatcttcttctacggcatggaccggggcgagagcatggagatgagcatcgaagagggcaagaccctgatgatcaagtacatcggcccgggcgaacgcaacgacgatggcactctggagctgcagttcgagctcaacggcagccgccgcaatgtgctgatccgggacccccatgccgaagtggaagcggagcagatccgtctggcctcggcggaggacaagagcgagatcggcgccaccatcatgggtgcggtatcccgcattgcggtcaagcccggcgacaaggtgaagaagggcgatgtggttgccattgtggaggccatgaagatggagaccggcatctctgccgccatcgacggcgtggtagaggcagtctatgcccagtccggcgacattgtccaggccggacagctgctggtacgcctgaagatctgaacagcccgctgaattacagcataaaaaagaccctgccggagcagtccggcggggtctttttctgtgaggcagagtagaacgggcaaaaaacaggccctgcctgtgcctggagcagagcctgtttttcaaagggcccggtgtcctgaagggggaaagacgggaaccgggacagagaaaagcggatttacagaagcgggaaatagacgggctgaccctcccgcttgtagatgacgccgcccttcatgaccagatcgggacgggtcatcacggtgatgtcctccagcggatcaccgtcaaaggccaccaggtcggcatacttgccggcctccagagaaccgatgtcctcctgcatgcgcagcagttccgccgcgttgatggtggcactgcacagcgcctgcatgggagtgaggccgtattccaccagatagccgaattcccgggcctgttcgccgtgttcattgccggtgctgccggcatcggtgccgaaggcaaacttgacgccctcatgcagggcagcggcaaccacttccttgtgacgggccgcggcgatccgggacttgcgcaggacatactcggggaagggcaggtggggattatccagcacactgcgggaggcaatgatggtgggaaccaggaaggtgcccttctgggccatcagacggatgctctcatcatcagccatggtgccatgctcaatggaggtgatgccggcccgtaccgccgccgcaatggaggaggcgccatgggcatgggctgccgagggcagaccttccatttcagccacttcgatggcggcacgcatctccgcctcagtgaactgacccgggacggggtgctgcgggatctggacccgctgatcctggacgccgtagtgctgggcacagccaaccagctgctctgcctgcactttgcggggcatctggcactggacgatgccgccatccgggcagcactggacgcctgctggcatgccatcgccgccgctcccccggttgacagaataaaaaattcccgctacactgaaagtaagggatataaaaagacggacaggctctggcctgtccgtcttttgctgtttttagggcatgatgcagatttccgccccaaaacagatggggccaggcggggaagacagtataccggcagaactggacgggagtgcaggtcagttcccgctttccgctgccgtctgcctggcactgttcgctggcgagtgaggctcccggtcgggcctggcggtacagaagcgtgccaagcggggcagaatgcactcgccacaggagcagcgcaggtcagttttctcttttcgcagccgcctgcccggcacatgacttacgggcgggacttgtcaggcccggcagtatgggcagagcagtgcgtcccccgaccgggcgcaggatctgtccgctgggggaggccgggcggtctgagcaggcagctgagctgtcccgctgggaaaacagcagtcccttcggcctgttccaggcacataacccggggcaggcgcatatactgggatcagggcggctctgcccgtccgggagtttttgaaaggagtatggatatgcagcaaaaactgattttgcccctcaatcgcacactggttacagcctccatgggcaacgcggcctaccgtgccaaattcggctttccgcactacggcaccgatatggtgtcggcggtgggggataccaccatctatgccagcggcaccgggactctcatagccgctggctgggataaatatgccggcaatgttgtggtgatccgctatcccggggcggtgtaccgtccggacggcacagcggcggatgtgatcttccggtatttccatctggcggagatcgggaagatccccgccggggaaaatgccatcaccaaggataccattctgggacgctatggcggttcgggcatgggcagcaagaattactggagcccgcatctccatgtggaagcggacaccgatgtccggtatccccgctactctcccaccttcacccccagcggggagatcctgttcgggcgggctgccggcgccactgccgcaaccctgcgggactgtctggactatctctaccgcaaaacctccgcacccgaccgtcagacctaccagacggctggtgcgccctatgtggatcagaaggactttgccattccggtgctgcctgagtagacagactgtcccggacagagaaaaatcccctgccgtacttctccggcaggggattttttatgggaaacagcctgcgttttactctatggcagggttacaaggctccggtagcggggcgcatcgccgtcggtcagcacagtcagctccttggtctggcggggcagaccggcatcgctctccagcgtgaaggtcagggtcagcacgccgtcctcctcctgagcggtgagcagatcgatctcataccggcgcaggtcaccggcagcaccggcggtacggtagcccgcctcctccgggcggtaggtgaggttatcctcccgcagccactcgggactgagcccgaatgcctcctccaccgcggcttccagttcgccttcggggaagaacaggccgtcctcattggcagagagcagcggcgtcaccagaaactccccgccgttcccctgggtgagaatccagcgtcgcagataccattgggtcagatagaccttgtcgatctcctcgggggattgccagtcctctccctcgagcaggaaatccagccgccggatcagccccagatagagggcagaatcctcctccgcctggaccgaccgggccagggcagccggtgagggttccggggcaggatcttcgctgcggcagccggcaaacaccagcacgcagagcagaagcagggtaatcagacgatagcacataggcgcctcccaaaacaatcggttttgggaatagtatgcccattgcagcggcgctcatgcgcagggataaaaagaaaacgctgtacttcatacgaaatacagcgtttgtctggtgcgccaagagggactcgaacccccgacctactggttcgtagccagtcactctatccagctgagctattggcgcacatgcttgattcagctatatgataataccatatccacaaccggaagtcaagacccttttgccaaaaaaattccggaagtctggatgcgagtgaaatatgtcggaactgtgtcgcctgcatggcaggaatgtatatttttgctcaggctattgtattcgggaaaattttcccgtataataaaactgtatcattcaagttggtacagttgagaacgagcatcggaaaggaaaaatttcctatgattactatcaatatgctatcccgggcggacagtgtcaaaggacagggcgttctgtcagcctatcaggaacaggtcaagctggtcaaggaagaactggcagacgagttcctctgctatgagaataagaatgccttctgcgacatcatgcattaccatactatcaatccggagttctatgccatgcggcagctctcccggggcaggagcgtttcggtgggctatgtgcatttcctgcccgaaaccctggataaaagcctcaagctgcccgatcatatccgggacatattttaccggtatgtgatccggttctataagagcatggattatctggttacggtcaatccttatttcatcggggagctggagaagtacggcatttcccgggaaaaggtgacctatatcccgaattttgtatcggaggagcaattttatccgctgccgccggaggaaaaggccgccctgcgggagaagtatggcattcccgaggggaagtttattgtgttctgcgccgggcagctccagcgccgcaagggtttcttcgactacatcgagctggcccgccggatgcccgatgtgctgtttttgtgggcgggcagttttgccttcgggctgatctccgacggacacgatgagatcaaggccatcctggaaaacccgccggaaaacttccggctgctgggtctggtggaacgggagcgcatgaatgagctgtataatctcaccgatctcatgctgctgccctcctttgaggagctgttccccatgaccattctcgaggccatgaactgccatacaccgatcctgctgcgggatctggacatctatcacgatatcctgtttgatttctacctgcgcgcagatggggtggacggctttgaacaggagatccgccggctgcagcaggacgctgcctattatcaggaggcagaggcccggtcagccaagggtcatgcattttacagtaaggaaaatgttgccagaatgtggaggacattttatcatggagtggtatccaaacgcccggcaggagcaagccgtggaaaaaatcctgcccgtctcgccggatctgccgtccggcgggcgggagaacaacttacccccggccggaaaaagtaaccgctggggaatactcatcattgtcctggtggcagtgggcagtattgcgggagcgttcctggctgatggcccggagaagatctttgcctccctcaccggcgccgacaagcgctggctggcggcaggggctggctgtatgctcatctactgggcactggagagcggctgtctgcatctggcagcccggaaggcctggcccggacagcggctgcgcacttcggtggtgacctccatgatcgggcagttcttcaattgcatcaccccctttgccagcggcggacagcccatccaggcctattatatgacccggggcggtatgccggtgggcaaggccacttcggtgctgcttgccaagttcatcgtctaccagactgtactggcactctattccgcaggggtgctgatctttgaataccgcaacttcgttgagaacatcgacggcttctccaagctggcgctcatcggcttcattgtcaacgccgccgtggtggttgtgctgttctgtgtgggcttcttcccgaagatcaccggcggtttcttccagagctgtctgctgatcctggcaaagctgcgcattgtccgggaccccaagggcaccggcgccggcatcgaccgggagatcaattccttccatcagggctttaccgagctgcgccgggagcggagcgtcatggcagctatggcagtgatgaccaccttccagctcaccgctttcttcctggtgccctactgtgtactgatggccctgggcgtccagggactgcaggtgggcgatgtggtggcatcggcagcctttatcctgatgatctcctcctttgtaccccttccgggggcgtcaggcggagccgagggcagcttctatgtgttcttccagatgttcttcaaggcatcgggcagtgtgagcgttgcgatcctgctctggcggatgttcaccttctatctgcctattgtggtgggggtttattttgcccggcatctgtccggactgaatccccgttcccatagcgggaaggattctcccgatcatcctgcaggatgaaacccggttttcacgcatttttaacagcgtccggtggaatgcgacaaatctttccaccagggcgctatttttgactttcccggaaatctatctgaaacaaagtgggttgttttgggaaaaatcagggtagttttccactctttccacagagttatccactgaaatttgtggacaatcctgtggaatatgtggaaaaccaaactatctgactctgacagcagaatgatatttttcctgcaaattatcccctgacccttgactttgcccgcggaaacgattatagtagaggtattgaaacagccgatatgggtggtttcagtcaatagcagaggtaagcagtgatgggaactgcggctgcggtgctttgagagagagccggtggttggtgcaaaccggtgaaagcgcgggcctttccattcccggagctttcggtgatgagccgaagggtgcgccctttacagcggaactttgagtggtccggtgggaatttccatcgggcaatttgggtggcaacgcgggtatccttccgtcccatgtgaatttttcgatgggttcgggaggtttttttatttctcctgatcccggaaaagcgagcattttgaaaaaataatccaaggaggaacacagaaatgctggatatcaagttcgtcagagcaaatcctgacgcagtcaaggagaacatcaagaagaagttccaggacgagaagctcgttctggtggatgaggtgctggaattcgaccagcagtaccgtgaggcaaagaccaaggcagacagcctgcgcggtgaacgcaacgcgctctccaagcagatcggcggcctgatggctcagggcaagaaggacgaggctgaggaagtaaaggcccgtgccgctgccatgggtgaggagatggaaaagctggaagctctggaaaccgagctggaagccaagatcaaggagagaatgatggtcattcctcagatgatcgatccctctgtgccgatcggtaaggacgacagcgaaaatgtggagctggaaaagttcggcgagccgctggttcccgactatgagatcccctatcatgtagatattatggagagcctggacggcattgatggaatacaatggcatagctggtttgatcatttgggagatg

SEQ ID NO: 4483 - DNA, 22063 bp, Unknown
  16S sequences of unknown bacteria
ccagccgatgcacactttcgacgcggaggatatagcgggcaagaagataatagttgacgccagcaagccgggcgacaagttcacgacgctcgacggcaaggaaagggagctgcctgtaggcacgctgatgataaacgacggcgaaaaggcagtcggtattgcgggcataatgggcggactaaattcagaggttaaggatacgaccaagacgatagtcctcgagtcggccaactttgacgctgacactatcaggctttcgtcgaaggaaatgactctgcgcacggaggcttccaacagatattcgagagggatagaccctaacatctgccgcgaggctgcggatcgtttctgccatcttgtagagcagatcggtgcgggaaaggtggtgcctggagctattgatatctatccggaagaggcaaagcctatcgtgtgcgatgtgagagtatcgcgcatgaacaagctcaacggtataaatatttccagagaagaaatggtaaaatatctcgaagcgctcgatatgaaggttgaagatacgggcgatcctgatgttatgcgcgtaacgccgccgacagtgagactcgatatgaaagaggagatagattacgcggaggagatagcgcgtatgtacggctacgacaatattccgctgacgctgccgaagatgaacacgcagtcaaccgtgtcaagaagctggcagataagagaacttgcacgcggcataatgacatcgctcggcgcaaacgagatacagacatattcgtttgtaagtccgaaaagcgttgatatgctcggacttgacgaggatacatgggaaaagaatttcctgacgctcttaaatcctctcggcgaggagacttcggtgatgagaacggtgctgatgccggagatgctcgaggttatgggcaggaactattcgcgcaatatcgataaggtatgcgcgttcgagataggaaacacattcctgccgagcctcatcgacgaaaatgagctgccgtcggaggaactttcgatgagcataggcgcttacggcgccggcgaggatttcttctcgatgaagggaagagtgagcacgcttcttgaaatgctcggcataacaggactcgtatttacggctgaatcggagtacggcgctttccatccgggacgctgcgcgcgcattcaggtgcctgacagaggcggcgagatgatggaactcggaattatgggcgaagttcaccctgaagttgcagaaagattcggtatccagacgagagcctatgtctgtgagctcaattttgaatatattatcgccagggctaatatagagaaggcatacagcccgcttcctaaattcccgagtgtagaaagagacattgcgctgctcgtcgatgaagatgtggaagtgggaagcctcgaggcgatcattaagagcgcaggagacgcgcttatagaaaaggtagagctgttcgatgtatacagaggaaagcaggttgaagagggtaagaagtcgcttgcgttcagcatcgtatacagagacagaaataagacactgacggacgatgatgttcagaaagttcacggaaatattcttgctgaactgaaaagtaaggttaatgccgtactcagagaaatttagcggaggtatcagatggataaaagtgtggtaagcgtaaaaatttacggacaggaatatacggtatcgggagataaatcaagagagtatataataaaggtagcggactatgtggatcagaatatgagagaaatagctgctgttgccgcagggattcctgctccgtcgcttgcggtgcttgcgtccgtcaatattgcggatcagtattttgagacggctgcaaggctctctgttcaggaagaaaaatgcgccgagcaggaaaaggatatagagcattatataaagctgtgggaagaagcgaagaaaaactttgtgcagttcaaggaagaagcgggaaagctgctccagcagaaagaagagctgaggcagacatcagacgctaaggacaaggaaaatacggagcttaaagcgcagcttgaggggttagaagaaaaaattcgcagtgaatttgaagaaaagattgctttagctgatcagagagtgaaagaagcggaaagcaatttcttcgatctgcaaatggaaaatatccgacttaaaagtgaacttgaaagattcaagcggacgcagaataatttttaaggaaagatatgaacaagaaagcacaaagagtactcgagtacgataaaataattgaaatgcttacagcgcaggcctcctccgaaatgacaaaacgcttcatttcgggggtaaagcctctgcgcggtataagcgaaatccgtgagaatctcgcggagactacggaagccgcccggattatcgcccgtaaaggacctgctcctctgggcgctttttatgatatagagggaagcgtgcgctttgccgaaaaaggcggcattctgacgatgcggcagcttcttcagattttgtacaatttaaaatcggcacgagcctgttctgtatttttgaagaatgatgcggaagattgcccggcggtgctcggtattgcggaggttattgccgttgtccgtgcgctcgaagatgatatagagcgctgcattatttccgaagatgaaatgagcgacagcgcgagcacggagcttaaaaatataaggcgcagcatcgtgcggcagaacgagagcatacgcgcgcgcataaatcagatactgaattcgcaggagaacaggacgcttcttcaggatgcgatagtgacgatgcgcggcggcagatatgtaatacccgtaaagcaggagcacagagcgcgttttccgggtattgtgcacgatcagtcgcagtcgggggcgacgctcttcatagagccgcaggtgatagttaatctcaataatgagctgcgcgagcttgagctggcggaaaaggcggagatcgagaggatactcgcggagctttcgggcgatgtggctgctcatgctgctgagatcatcaacaatcaaaagctgctcgtgaagctcgattttatatttgccaaaggcaagctgtcgaagctgatgaacggcgagccgccggagatgaacgaagagggcgtgctggagcttaaaggcgcgcgccatcctctgattgatgccgccaaagtggtgcctgtgtcactggaaataggaaagtcatacagcactcttgtaataacgggaccgaatacgggcggcaagacggtgactttaaagaccgtgggactgacggcgatgatggcgcagtcgggtctccatatcgcggcaaatccggggtcgaagctgcctgtttttaagaatatttttgccgatataggcgacgaacagagtatagagcagagtttgtccacattctcgtcgcatatgaacaatatagtgtatataacgaaaaaagcggggaaggacacgctggtgctcgtcgatgaactcggcagcggcaccgatccgacagagggtgcggcgcttgctgtttctgtgctcgattttttgaagtcggcgggtgcgctgacatttgcgaccacgcattacaacgagcttaagaagtacgcaatatcgacggacggagttatgaatgcttccatgcagtttgatgtggagacgctttctccgacatataagctgcttgtgggcgcacccggacgttcgaatgcgtttgaaatatcggaaaagctgggacttccggcagcgataatcgcgcgcgcgcgcggactcatagagagcggtgatctcgaatttgaagatgtggtgtccgctattgagcgcgacaggcgggaggctgaagccgaacgcgacgaggcactaatgcttaagatagagatgcagaagcagaaggcagagattgataagctgcaggcgcgcctcgcggagcagaaagagaagatactcagttcggcgcgcgaagaggcaagacagcttgtgcgcgaagcgcgcgaggtgtcgcgcgaggtgacggcggagctaaaagagctgtcgaaggtggagtctctcggtgagaggacgcgccgtctcgacgaaagccgcagcaggctgcgtgcggcaagcgccaaataccgcgaaaaggtatctgctgccgatacggattttgaacctgtggatccggcaaagcttttcatcggtcacagggtaaaggtgatgacgatagggcagaacggcgaagtgctcacgctgcccgacagcaaaggcgacttgctagtgcaggttggcatcatgaagataaatgcaaatgtaaaggacctgatgtcgatagagcagggcaaaggcaggagtgcaggcagcgcaggcaaggggcttaagcggcgcggtcctgcgggcgcgggctttggtcccgcaggcggaagcagcagcggctctgcgggcggctcaggcaagggctcgcaattcggagcttcgggtgcaggttccggcagcggaacggggtacggagcgctctaccgctctaaggtaatgagcgtgccgctcaccataaatgtgcagggcgaaaatctcgacagcgccgtcgccgatgtcgataagtacctcgacgatgcctttatggcaggactcgaggaagtgaccgtaatacacggccgcggcgagggcatccttaaaaacggcatcgcgcagcttttaagacgccataagcacgtggattcgttccgccgcggcgcctacaacgaaggcggcgacggcgtcactgtagtccgccttaagaaatagcaaaggcagaaaaggagatattgcaatggaaatcagatatgtcgctcaaagtgatgatccacttgaaataagcaatatatatgaaagcagttggaaatacgcgtataagaatattattccgcaggactatcttgacagtattccaaaagggcattgggcagacaatatcaatcaggagagcaggaataatctggtcgtaatagaagatggagttattataggtactgcgagtttttgtaagtcgaggtgggaagagtacagcgattacggagaaattgtttctatatatttcttacccgagtatattggcaaaggctacggcagtttattgttaaaaagatgtgttgaggaattgcagcagcgcggttttgataagatgcttttatgggttttggaggataactgcagagccagaagcttttatgaaaaaaatggttttttgtgtgcagaagtgtttttagaagataacatcgggggaaaagatttaagagaggctctttatcttgctgtttagaaaaaatccagcgtacagaacagatagaattaagacttgtgaatgcaaccatacttgttctttaactggtaaatcaaaatcggatgatgtaataaagaaactgattaggagataaagcagatgagactgaaaaatgtattgattgttgttaaggatattgaaaaatcaaagaaattttatcacgatttgttcgggctggaaacagtgattgacaatgacggcaatatggttttgacggaggggcttgcgcttcaggacgaaaaaatttggagagactttctcagaagagatattattccggagagcaattcctgcgagctgtattttgaagaacgcgatatagaagcatttattctgaaacttgaaaagctgtatccttctgttaaatatgtcaaccgactgatgacgcacagctggggacagaaagtgattcgtttttacgatccggatggcaatttgatcgaagtcggaacgccgatgtaatattcggcgcgcatgaattaacataaatgttttgtgagtcggaaaggggagcgggaatggatttgctgaaaattgctttgctgcagattgcgccgtgcggcatgctcaatgaaaatctcgaaaagggaatcgaatactgccgaaaagcaaaagagaaaggtgcggatattgcgttgttcccggaaatgtggagctgtggatatgatatttacgaaaagtccgccgatgcattgacggcagaggcgattgacaaggacagcgattttttgcgcacgttcagcaggctcgccaaagaactcaatatggcaatcggagtaacgctgctcgaaaagtgcgaaagcgcaccgaaaagtcaaagcgctccgcgcaattcgctcgtgctgtttgacagatacggtgagcgcaggcttgtctatgcaaaggtgcatacatgcgatttcggagcagagcggaatttgacatcgggagacgatttttatgtcacagatctcgatacggcctgcggctttgtaaaagtcggcgcgatgatttgttacgacagggaatttcccgaaagcgcaagaattctgatgcttaaaggcgcagagctgattctcgtgcccaacgcctgcccgatggaaataaaccgcctggcgcagcttcgcggcagagcctacgagaatatgacggcaatcgcaacttgcaattatcccgaaactgtgcccgactgcaacggaagatcgagtgtttttgacggagtggcatatcttcctgaaactgcgggctcgcgcgatacttgtattcttatggcggacggaaaagaaggtatttatactgccgagcttaatttgcggagtcttcgcagttaccgcgcaagcgaagtgcacggcaacgcgtacagacatcctaagaaatacgaaattttgacggacacggcggttgacgagccgtttgtaagagcggatcgccgtgattagcagacagcaaaccgaacgcttttattttttctgcggggcaaagagatggctgcttataaaatatcggattttgaaaagatacatttcaattgaggaaatgtatcttttttatgtgcatgcctgaaaagatcattgcggcaaaggatggatatgtaaaatttcaaaatatgcagtcggactcaaattgcgaaaaatgatatatatcataactgagtgtttttcgatgtagtaaaaaacatatggtaaaagtatgcggagtatggtataatatttgcaattacttgcttctgcaagggtgcagacaaatttgtgcaaggctgcaagcaaattgcaggtacagacagcgcagacaggtaacggaaaaagcatatctgaaattatgatatagtatgatacgggaaggaaaagaaaaatgtatcttataagcggttgccttttgggtcacaattgtaaatacagcggcggaaacaatctgtgcggcgatgtaaaaagcttcgccgaagagcacagcttttttgccgtgtgtcccgagaccgcaggggagcttcccgtgccgcggccgcctgcagaaaggctgggcggcagagtctttgacaaagacggtcaggatgtcacatatgcttttgtccgaggcagcgagaagtgtatggaagcggcggaagcagaggcccgaaggcgaggcgagaagatagaaggtgcggtgctcaaagcgcggagtccttcgtgcgggcgcggcgtcatatacgacggcacattcacgggcagaacgataccgggcgacggtgtttttaccgagatgctgcttgagcgcgggattcccgtttatacggaagatacgctcaaagaactcgaagaattagtaaagcgaagaggggcgtagctgctccggattttacataaagataacgagaaacgataatcatatatagagaaaggattgaaagatgataaattataaagaagagattgcgaagattttaacggatgccgacataggcctttcgtttgacgagattaaagaaatcgtagaggtgccttcggacagcaagatgggtgattatgcgttcccttgttttaagctcgcaaaggtgctgagaaaagcgccgccgatgattgctaaagatattgctgaaaagattacgggaaaagatttgtttgaaaaggttgaaagtgtgaatgcgtatgtaaatatgtacatttccaaacagaattttatagaacatgtagttccggaaattgtaaatgcgggtgattcttttggcagaagcaatatcggtgaaggaagaccgctcatcgtcgagtactcgtcaccgaacatctgcaagccgtttcacatcggccatatccgttcgacggtaatcggaaatgcgctctataagatatatgacgccatcggctacgatgttatcagaataaatcacctcggcgactacggcactcagttcggtaagatgatagtcgcgtacagactttggggaaataaggaagatgttgaaagagagccgattaaaacgcttctttcatattatacgaaattccatgttgaagttgaaacgcatccggagcttgacgatgaagcgagaaaagtgttcgtaaagctcgaagccggggaaaaggaagaggttgagctctggcagtggttcagagaaatgtcgctcaaggaattcaaccgcgtatacgatatgctcgatataaaattcgattcatacaacggtgagagcttctattcggataagatgccgagaattgtaaacgagctcaaggaaaagggacttcttcaggagtctcagggcgcgcaggttgtggatctttctgaatacggtatgccgccggcactcgtaacaaagtcggacggctcgtcgctctacctcacaagggatatcgcggctgccgtttacagaaaggaaacttacaattttgtaaagaatatatatgtcgttgcctcgcagcagaatctgcacttccagcagtggtttaaggtagttgagcttctcggctacgagtgggccaaggactgcgtgcacgttccgtttggtatggtttcgctcgaagacggcacgatgtcgacaagacacggaagagttgtattccttgaggatgtgctcaataaagccgtagatcagacgagagagatagtaaaagaaaagggcgtaaatacggaaaacctcgaagagacggccaaggctgtcggcatcggcgccgtaatattccaggagctttccaacaacagaatcaaggactatgttttctcttgggacagagttctcaactttgaaggcgaaacgggtccgtatgtgcagtatactcatgcgagagcgtgctcggtactccgaaatgcgggagaggagcttgtcgcaaaagcatgtgagtttaaagatatagacttctcgtacctcacaggcgatgccgcttatacgctggtaaagctcatgtatgagctgcctgatgttatcgtggatgctgccgagaaatatgagccgtctgttgtgacaagacatctgatagacattgcgcagggcttcaaccgtttctatcatgaagagcatatactcgttgacaacgaagcggaaaagctggctaaggttgcgcttgtaaaggcggcgaagaatgtcatcgccaacggtcttgcgcttctgggcatgaaggcgcctgaaaagatgtaatataggggagtttttagggattattatgagatatgaaggaatgatatataggcctccgagtgaggcctatagcttacttttgcaggttacgataggctgctcgcacaacaagtgcagattttgcagtatgttcaaggataagaattttcgcgtgcgtggcatagaagaaattttccgcgatatagacgagtgccgcatggcgtacaggtatgtagacagagtatttctctgcgatggcgatgcgctgtgcctggcgacagataagttgcttgcgatactcgaatatataggaaagaaatttccggaatgcgagagggtgaatgtgtacggctcgcctaaagatgtactgagaaagacgccggaagagctcgtgctgctcagaaacgccggtatggaaatgatatatataggagcggaatcgggatccgataaggtgcttgccgatgtctgcaaaggcgcgacacggaatgaaataatagaagcggtgcgtcgtatagaggatgcgggcatcaaggcttccgtaacatttatatcgggcctggcgggaagagacggctggcgagagcatgcggttgaaacaggcacgatgataagcgagatgagaccgtcgtacgccgcgcttctgacgctgatgacggaagagggcgcgccgctcacggaagatgtgaaaagcggcaaattcaagcttttgtcgccggaagaagtgattgccgaaacggtgctgctgctggaaaatgtaaatctgcctgaggatgccgagtgcgtgttccgcagcaatcatgcttcaaattacctttcgcttgccggtaatctgcctgccgacaaagagaaaatgctcgcgcagctgcggcgggcgatgcaggatcgcggaatgctcaaagacgagcgctttcgagcgctgtaaagcggagctttaggcgacgaattttagcaaaattgaaagaaatgttatataaataagccgctttgagcttcactggcggcattattgggcttttcacgacgagaagacttttgccggaatggaaaaaaggaaagaaaaatgctgaaagaaagactgaaaccatattttgaagaactcgtaaaatcatatgtgtttaacgagctttctgttgattttttaaataaaataggcgcatccgacattctgctgggcgtacctatgccaataaaagaaagcatgcttacaaacagtaaaggtgtatcgcttactgtgctcgatatagcgcgtgctgcggctgtcgtgcttggatgcgatcctgattttccgtatgccgaaacttataagctgtttttacagcgaatatttaaggaaaagacggaagaagttctcgtaagcgaaggctatgagaggttcagcagtgcgagtgctggtgtgagtgctgaaactgctgaaagcgccggatgtacggttgatggtaaaggctctgagcagaggaaaaatgagctgcttgaagcagcgtgtttttttagggcggcgataattataaatgaagtgtcgttaaacgggctttacggctatgcgctctgctgccgggagctttatcttgatgcggatgaagaaacatatatcggaaaattcaaggcggagtctatagaaactctggaaacgcttacgatcaaacatcctgattttgcttttgcatattattatttggggtatgcgtatctcaatatgggactgtatacgaaagcgtatcttgtgtggaaagattttcttcaaaaaatagatggcagctcttccaaagatgagttgaatgacgagataaacgaaattaaagggaggatggcgtcgctggcggcacctatggaaatagaagcgggtgttgcggctgtgacatcaggcaggtatcacgagggcatagagatactttcagagtacgcgcaaagtgagttttctgcgtggtggccgatgcattattatataggtgtggcatacgaaagtataggaaaggcagaggaagcgatcgcagcttttaaaaaagcgctcgagttcagcccatcgaatatagaggtaatggatgagctcgttgctgtatactgtgcgctcggtgataaggaaaatgaattaaagtatgcgagaaagatagaagttgtgcgcaaaaattacaagcaagaaggaagcttatagcagattttaaatgataattaaaaaaggggctgtctctatctattttgttttgagacagcccctttttctatatttgtaattagataatctataattttgcgcctaaagctctatgaactgacctacgccttgctcaacagccttttcgtagatgcgctgcgcggttacgatatcgagtaccgcacttcctgttgtttcaaagaatgtaatttcatcatcagactcgcgacccttgattttgccgtttattacttcaccgagctcgccggtgatgcggtctgcactgaaaattcctttatttatcggttttataaaatctccggattcttcaagagcgtcaggcgtatccatatagattttgtcagcgtgggtgatgatatattcgtcgatttcagaaagctgaggagtatatgagccgacgccgtttatgtgagcgcccttttttacgagtttgccgtcgaatacggggtctttggcgacagttatagtcgtgatgatatctgcgtcttttacagcatctgcggaagttgtaacagcctcaaatttagcagcaaatctgcccttgaagagctctgtcatctgtgctgccatatctttggcgcgctcggtgtttaaatcgtaaacctttacaagctcgattcccgggcgcactgtaagtaccgcttctatttgaccgggagcctgacctcctgtgcctatgacagcgaatattttactgtctttgcgcgcgaggtaatctgttgcaaggcctgccacagcaccggttcttacgcgtgtaagatatgtaccgtccataaacgaagaagtctcgccggtttcgctgttcaaaagcaccattgttgcgggcacgcttggaatacctttatctatgttatcgggatatgtagacacgattttgacgccgagtgcgtttgctttggctgcgtatccgtacatatagaggctttggccgttgtgctcgggcacgtcgaggtttgccctgagcgggatgttgctttcgccggcagagtagatcgaaagtgcgtctttgtccgcattgatcgcttcttccatcgtgagtacggcgcgcatatctttttcattgagaacgagtattttcatattattacctccgaaaatttcaatcaaattctgacttttaccagctaattattatattattattgaaataaggccttgtcaatacttttgagaaagtacgcttattttatagcggaagaagcgagcgcaaaaagaacggaggaaaaaacggcgatataataaggcagcagaagcgggccgcctgaaaatgctgcggacacaagagaggtgataaacggagtgaaaaactgtccgccgtaaagtgctgcggataggagcggcataatgctggaagcggcattttttccgaccttttgggaagtatgcgatataatgcatggaatacctactccgttggcgaagcctatgagcacggaacctgcaatgacatatacggcactgtttccgagcgaaagaaggagatagcctgcaaggaaaaggcacggggcgagaaaccttattttttttgcaagcagcttcttcaatgagacaaaagacagtccgccgataaatgctattatatccataccggacataattatggcaatcatgttatgcggtatgataccgctttgtgaagctatcattgcaaaatttgccggatatatgaaaaatgttaccattaaaagaaatattgcagctatactgaaaatattttcgcggataattgaggctgtacctgttgatgtcttcatatgctcgctgctttcttcgcaggagttttcatgcgtgctgctagcaattctatcattggggagaaagaaaatgcagagcacgatgcttataagtccgagagcatatacgaagaagctgaaacgccagcttatagaagcgagcagacccgaaaaaagtgtcgcaacggcaccgccgagctgattcatagccgaagagtatcccataagtttatcctgcgcttccggtgcgaaatagaaagaaaggagacctgtggaaagcggcattatgatgccgacgccgacgccgacgagagctcttgtgagaaggagcagaaaaatattattaaaaagacctgcaatgcagccgcctgccgtgtacagcataaggcctgtaagcacgagcgtttttgagccaaaacgcgcgcataacttaggaaaaataaggtttgtaagtataataaaaagcgatggcatactgattatcatttgtacaaacagcggattttcatttataaaatactgttttatgcttccgagagcgggggcaaccgcggcgccggccattactgtaagaagcgagagcgaaagtatgctcaccgttaatttttttaaattattttgttgttccatattgcaaatacctccgattgtaattttagaaaaaaacaaaagcgcaagcccgtttggacttacgcttttgctgctcaacgaatttattttaccaaaataaatcttagaaatgcaagtaaaaaataaaaatatttatgattagacaatatccttgtatttatcgagaaaagtctgcaaggcgccgacgagattagcgtcgttttggaatttgcttgtgacaacctctgcgcgcggtatgcggtaagggcaggagtcatacaagatgtcaagctgtttgcgcaccgcatctataagctcggctctggcgctgataccgccgcctatggcgaagcgctcaggatcgagaatagtttgcagattgaaaatctgcattgcaagttctctggcaaatttggtaaggcattccgcggcagctgggtcgcccgatgagagtgcatcgaagaaaacataaccgtcgacggagtttacggggagccctttttttattgcgtagcgggcgcagagacctgctgtgccgcagcggttaccccatatgctttcctccgtcggcacctcgtcgcgcagcgtgtttatgtagctgatttcaccggcggcaaaatggtgtccgcgctgtactttgcgatctttgatataggcgccgcctatcatagtgccgagaacgatgacatagccttcttttatatccttaaggcttccgagcgtcgcttccgcaaggccggcgcagttggcgtcgttttcaataatcattggtacgcggcaatgcgcgtaaagttcgtggcgaaggtaaaagtcgtcattgtagcggagcgcgcctcccattactatgtagccgttttcagcatctatgatgccggggagggaaattgcgataccgacgacgtcattttttaagcggaaaagtgcggagagcgtgtcgagcaggtctttgcgtccgctcataggggttggcatagtaccgcgttcaagaattgtattgtcgggctccataaaggcatatttgatgaggctgccgcctatatcaattgtaagtatactcatatttcttacctctttttaatagttgccggattgtgattttgcagacttcaaaattcaatgtcagtttatcataaagaaagaggatgggcaagcgcatattatgatatgctgtcaaaaccttttggtatatactgcaaaacgaattggaacttccgcagaaaaagcgttttttttataatacagatagtgaaatgttggtgaaaaccagaaggaaagcagcgagaaagatggagttttgaaaaatggcacggatgccgtttacttctccgccgtattcggcggcttcggaatcgcgggcaattaataaaggaggttttaagatgagaaaagattttggaaagaagacctggttttatcctctgccggtactgattgtgggcagttacgatgaaaacggcaaagcggacgctatgaatgctgcctggggcggtatctacgaccaagatcatgtgatactatgcctcagcgccaatcacaagaccacgcagaatatcaaggccagcggcgctttcactgtgagctttgcagacctcgctcatttagttgaggcggactatgtggggctggtttctgccaatgatgttgacgataagctggaaaaggcaggctttcatgctacacgcagcctgttcgtggacgctcccgttatcgaggagctgcctatgactctggagtgcaggctggtaaaagtgaatgaggatggtaagctgatcggcgagattatcaatgtcagcgccgatgaaagtatcttgaatggagacggtatgattgacactgacaagcttaaggctatttcctttgatcctgtcaataacgcctaccttaagctgggcgaaaaagtgggtaatgcgtttcaggatggaactaagctgaagtaatttacaggcaagtcgcagtgcaaggaggaaaaataatgaataaaaagcataaatttgccgttttggcggcagcagctgtactgagcatctctatgctggcaggatgcggcaacaatgacgatacatctcagaatataggcgataataacgccgccgatagctccggggcgctggttatcgccgagcagggaatgttctctgctggcggtacggtgctgacttctgaaggcacatttgacgtttccaattactatacgtcaagagagggatccacttctcatgtggatcacgccaatgtactctatcagatcccagaggatgatacaggactgcctatggtattcctccacggctatggtcagtcacgtatgggctggatgactactccggacggccgtgagggctggtctgatatgtttctgcgtatgggacacagcgtgtttctcatcgatcagccgcgccgaggtgaggctggccagacttcggtggctggtaccatcactaccgagccttccgatcagacctggtacacccagtttcgcatcggtacctatctgaacgatgaatttacttataatgagggctcaaagtttcctgcgggcgaggaggttttagatcagtttttccgtcagatgacaccggataccgctatggactccgcaaacggcgaccagaacattgacacaactgtagtggcgcgcgctgtagcggcgactattgacgaggcatatgagcgtacaggtaaggattctattctggtgacccattctcagggcggtatgccgggatgggaaactgcccgctacacagatcatattgccgctatcgtggctattgaaccgggtatggcgcctcaagcggacagtgacgattacaacgctctgttggaaaaggaaatccctgtaattttctattacggtgactatataggagaggaattcaccgacgttccagcggcgggtatgtgggatatgatggcggcaactgctgattcctttaccgaggcgtacaataaagctggtggaaacagtaccgtcattcatcttccggacgagggtattaccggcaactctcactttatgttccaggagttaaacaatgatgtgattgccgagcatattgaaaactggattaaggctaatgtcaagtaagatattttttacgattggagacaactgcaaatggaaagcaaatttttaagggaaattaaacgctgcctatccatagcagcattctgcgatcggcagggacttaagtcaacgaaaacatctttgaaaagctttgagaaacaggcggcgaaaggcagcagaaatatatactcagagccggcctgagcatgttgctgatgaaaggcaggaaatatatgaatctgatctcatgtgttttgacgttgagtattctgctttcatcctgcttgggaggcattcagactcagaattcatatgaggatgagaaaatgaaaaccgagacttctttggaaaccggatttattacagagcaggttcttgatggtgcggacggcacaattcattacagctactatctgccgcaaagctatgatggcagtaaagcttatcctctgatgatgactatgccggggtacgacatgatgtggttcggggaagaatcttccggcagtaatctgtcatttacgggttttctgtcctggacggaactggatgaagatatgatcgttgtttcagcacagctcacagactggggcgagacatctgcacgccaggctattgagcttacagagtatttcattcggaattttgaggtggatgaaagccgcatctttgctgccggatattcggcgggtggagaaacgatgtcgcgagcggtttcaatgcgccctgatctttacgctgcctatttgcacggagcttcacagtgggacggaacatttgcatcggtggctgaaaaccgggtggctgtctacatttttatggcagaaaatgacgaatattatggctcgcagaaggctcgtgatgcctatgatggcctttataatgcttatcaggaaattggtctgtcagcagaagagatcgacaagctcctgcagctggagattccggataacagctattttaacgctttgggtatttacaattaccacggcggtggaaatgtgctctttgatgatgaaactattttaaactggattattcagaaaaataaggtacaaaagtaaaatagaaaggaactaaaaaaatgaagaatttaaaaaagcttttatgcttgttgctggcagttataatgctgattgcaatgagcactacagcgtttgctgcggtcgacgacacgggattttccgatgtggctcaaggtgcgtggtatgcagatgccgtgacttatgttcgagacaataatctcatgagcggtaccagcgataccgcattttcccctaatgcaaataccagccgcgctatgctggcggtaattctctatcgggcatcagacagcccggaagtttcttcgtctgccggatttactgacgcggcagacggcgcttggtatactgatgcggtaaactgggctgctgagagcggtattatttcgggttatggcaatggcctgtttggtataaacgatctgcttacccgtgagcagatagctacaattctgtggcgctatgctggaagcaattccgcttctgaagctcagtcttttgcggatgaaagcactattgcttcttatgcttccgacgctgtagattgggcgcaggccaacggcataatgagcggaaagccgggaaatctctttgatcctaagggcaatgctactcgcgccgaggttgctacgatcctgagcaactacatgcagatgagtagtgcggagcctgaaccgacgcctgatcctgagggcagcaattcacgcgtacttgtggcatatttttctggcagcggtaataccgaagctgcagcagagatgattgcggagactttggatgccgatatctttgagcttgttccggctgatgcttatacggaagcagacctgaactggaccgtttccggcagcagagtcaaccgcgaacatgataatgaggccctgcgcaatgtagagcttgtgacagctactgtttctaactgggaggattatgacaccgtgctgatcggttatcctatctggtggggcattgctgcatggcctgtgaatgaatttgttttgtcaaatgattttaccggaaagacagtgattcctttctgcacatcggcaagctccggacttggccagagcggtgagctgctggcagagatggctggcgacggcaactggcttgagggacaccgcttctctgagcgtccatctcagtccgatatccagagttggttaaatagcttggagatttttggcgaataaactatcggaccttattaaaaaacaaaagaaagctaccgtttttatgaaaagacggtagctttttgcaatagcgaaacatttatatatgtttaagagaaattcatgacagatgtatttagcaatctcgagcaactatcggtatatttaatgacaaagtgaaaattccgtcaaagagaagtcgcatggcatccgtgattttcttttatttatctgcaattatcaaggatttacgaagcttgcgtttcggtagtaatacgctgacaaataaaatttttgttttggagcgtgaaacgattttggacggaaatatataggagaaaatcaaaatctattataaattcatcggttttgtcggtgaattgcatatcaccaccggctaaacggtgggcagcactgtcagagaagcgttgtgcggtatgcggcgtgaggtatatcccgcgggctctgttatttcaaagtattctcctgcttgtgctaagaagatacagcgggaacgtgggattgagggaaaacgcaggagccgggagagaaaaatacaggtatgtattgaactgttcgcaaaaaatgaacggctgactcgaaacagagacttggtcgggttgcgcgtcaagggaatgaaaataaagaggtgtatgtttttcgttatgttacgaagtatacttttgacgcatatctttatcaacttgcggaaggcaagcagaagttttcttcgcggattatgataagcaaatctcctgtcaggttttgcgaagacattgatgaaactgcgttttcttatgcataagtaaagatgcttgcaacaggtaatccgcgcattaaagataaaatggatttggatgttcaggggcaaaaacttcatttgctcaaatacaactatttttctgagatgaggacaaaatattaaagttctatccgcaggaaattgcgagaaaaacggcaattcttgaagagttaaaagcagacattgcccgtgcagaaagatacccgaaactgcttgacgatacttttgtcggtattcaggtttcgggtatttatttacattttatttatttttatagttatcgacatcaagcagtattttataaagctgtttttgttcgtctctacttttggaagataaaaactcataacatttcaaaggtatatcactggaaacgctgttttctccgagcttttcaaaaagtttagaaagagagacgcccaatgcactggaaattttttcaatactttcaatcgttgcgtttttctctccgcgctcaacctgtccaatatatgttggatgacattttgaaagctcggctaatttttcctgacttaagccttgctgtattcgatggttacggatacgttgtccgattaatttcgtaatttcactcatatacctatcctttctatatacagtctataaacattaattaaaacattccacagactattgatatttatgcagatttgatatatactataaatattataatgttgggtttgcgtgctcatagtattgaagagaatacataaagtgtatgaaatcaaaaggaaaacaaccgatattagttttattggtttcaatagaatgaattgtaatttaagtaaatatatagtaaatttaaaatgtgtaatagtaaaaatttttgagaaaggggcttgacaagggatggtgatgcaggaaataattttagcaagcaagtatagttctgtatttttgtcttgtcaagcgtgtttttatataattcaaagtgatttaagaagtgtattttgcctatttttccatgggcgagatgcacctttttgtatttgttcaggaaaaaacaagaaataacaagacgaaagggagttatgatatgaaaataaaaaggacaaagatattaagtctgattctcatagtatgcctgtgtatcagtattctgccgacaatggcgtttgcggcaaatgaaacgcggacgggcttaacactacatacgggtagtggttccagcacacagatcgttacagtcggtcaggaggtttccttacctctgccgacacgggcaggctatatatttgacggttggtataaagaccaggagtgtactgacggtaacggtccaatgatgaaaatcctgatcgaaaatcagactgaactgtgggccaaatgggtttctgaagaaaatgcggatacggttacaaaatatacgctaaactttaataccggcggcggagaagcgatagagtctgttgatacaacctacggagtcactgttgctttggaaacctataaccccgccaaagatggatatatatttaccgactggtttgcggataaagagttaagtaatcgtattacctccgtaatgatgacagaagatacgacggtgtacgccggctggatggcactggaagacggagaggctcgttatcagcagcaagccgacggtgagtggattgtagatacgtttgcgaaggcctgtgcaagagtttacgacggcggaaccatcgaggtgctgaaagatgtagaaatttcaacgccaatttctataagaaaaacacttacgatcacaagcgcggatgctgcacaaggtccgcataccctaaagcgtgcaggcaatttcacgccaataaacacgaatgaaagcctgctgaatatctattataaaggaagttggggtacagatacgtttgattcagatataacgctatatttggatcatatttatgtagacggcggcagcgaggatggaattacgacaacggacgacttaatttctgtctcctatgcaaatttggttcttggagaagaaacatctatccagaacaataaaaatgaaggaggacgttccggaggaatcggaagcttcggcggaaatattaccgtagggaaaggctcgcagatcgtaaattgtgaatcctgtcttggcggtggtatttttgcggacggcggcacggtgaaaatcactggcggaa

SEQ ID NO: 4484 - DNA, 14296 bp, Unknown
  16S sequences of unknown bacteria
ggccgccgtatctacggcagtttgcgcaaaatattctctaacctgttgccggtcgggggccgcaagggtgtaaaccgaacaccttgaccttatggtaggcagtatcctctgggccgaaagagttgtcaaaatatatgttatatcgtctttcggctcttcaagatttttaagcagagcatttgccgagtgggtgttgaaattttcacagttttcgattataaccactcgtttgtcaccctgaatggaagaaaagtttacattttcgttaatctgcctgattttttctatttttatctgccccatggcaccttcgccgtgaataatttgcacaaggggatttttcccctgtgaaatatcctcgatattttcggtatttaaaatatctcctgccaaaaggcgggcaaaataatttacccccaaacccttttcgccgcagataagcagagcatgagaaagaaaaccgcccgtaatcccattttcaagggcggctttcacagtttcgcttcctttaaaattttgtatattcatttaactttaattaagccttttcgtatctctcggcgtcaaccacaaatatggttgcaccgcctacgcacacttcaacaggcaatgatgcaatgccgatgccgtctgtggcggttacaggtacaaattctttgcgcatacgggaatttttcttgattatttcaatggctgcgtcaaccttttcccgttctgtacccactaaaagggttatgttaccggcggacaaaaaaccgcctgtggttggtattttggtaacggaatattttgcgcttataagttcgtgggttacatcgccccgatcgtccttgctgattatagctataataagtttcataagagttacctccgatatattttaaccgcagaaattttaagcggttatttgtttattgctttttactcaaattcttcaataagctgtgattttacgcttaatacggcattcggcgccatggaaaggttttgtatgcccatatacatacatcttagcactttcggtgtcggcggccgcctcgccgcaaacggatacgcttacacagtattttttgcgctattgccatttccgtttcgccgcagataagcagggtatgagaaagaaaaccgcccgtaatcccattttcaagggcggctttcacagtttcacttcatttaactttaattaagccttttcaaatctctcgacatcaaccacaaatatggttgcaccgcctacgcacacttcaacaggcaatgatacaaagccgatacattctgcggcggttacaggtacaagttctttgcgcatacgggaatttttcttgattatttcaatggctgtgtcaaccttttcccgctctgtacctaccaaaagggttacgttgccggcggacaaaaaaccgcctgtggttggtatttttgtaacggaatatcctgcgcttataagttcgtgggttacatcgccccgatcgtccttgctgattatagatataataagtttcataaaaattacctccaatatattttaaccgcgtaaattttaagcggttatttattgtttttactcaaattcttcaataagccgtgattttacgcttaatacggcattcggcgccatggaaaggtttcgtatgccgatatacacatacatcttagcactttcggtgtcggcagccgcctcgccgcaaacggatacgcttacgcagtgtttttttgcgtttgctattgtcatctccataagcttaagcaccgccggattggtggtctgatagtagtccgccactgccacgttcattctgtctgccgccatggtgtattgggttaaatcgtttgtacctatgctgaaaaagtccacataccttgcaagctcgtcgcttataagtgccgccgcaggggtttctatcatcacgccccaccttattttatcggcggatatttcaccttgttccaaaagctcgttttttattttctcggcctttgctaaaaagtcggtaacatcatttaccgttgtaatcataggaaacatgacatttaccttgccggctctgtccgccgcaacgtaaagagctgttatctgccgtgtaaataaatccgcaaaatcctcttgcaggcgtatgccacgcttacccaaagccgggttaggctctttttccggggttacgccttttaccggtttgtcggctcctatgtcaaaagtgcgtattgtaatgggctttccgccggcggcttttatgcaccgggtgtaaaagtcaagctgtctttcataggtggggtattcctctttcataaaaagaatttcacttctcacaagacctatgccgtcaaccccctgggctatggccttgcgtatgtccgccgggtcattgcagttggcgtaaattgatatcatatcgccgcccaaaacccttatgcggtgatccctcacttcctgttcggaaacctttgcacgccgttcaagccgtatgcggtgcttaaacattgcatatgtaccctctgccggagatataaaaatctccccggaatagccgtccatacaggctgtcttaccgttgtttaaggggtttaaaatctcactgtccaagccggttattgacggaatgcccatggttctggctattatgttggcgtggctttggtaactgcccccaacagtgataaaacccagggcgtactgcctgtctattgtagccaggtcacttggcataatctcatctgccactattattgacggctccgtgagaacaaatcgctctctgctgcggccgtccaaaatgtccacaactctgccgagaacatctcgaatgtcgctggtgcgccgtgaaagatagccgtcacctacttttttaagccttgtacagtattcttccatggcagcttcaaccgcccgggcaccgcccatgccgctttcgatatttgacaaaatcatctggttcaggccgttgtcatccaacatgacaagttgaaaattcaaaatgtccttgttttcaccgtcgtcgctttgcataagccggtgaatttcgtcttttgcaagtataacagccgcctcgtacagcgccttttctcggtgggttgcaagtaccactcgcttaaagccccgtattcttcggtttataacctttattttacctacggccaatccgccggaggccggcgagcctatgtgtcttaccactgtttatcccctcgattctcggcaaaattgagaaacaatttctcagccttattttaacacaggccggcggatatataaagacttaaattagataaaaaacataggaatatttgcacattttgtacattttggagatatggtgtccacaaagaaaaacaaaaaaagacagccatcaaaggctgccttaaaaagatggtgcggataacaggacttgaacctgcaccgagttgccccgactagaacctgaatctagcgcgtctgccaattccgccatatccgcgtatcacagagtatattatatataaaaactctcttttagtcaagaaaaatatttgttcggtgtcctatgggcagaaaaatgtatttattttgtcttttccaatccaaagtattccaaaattgatttgtaatatatctcggcggcttttttacagccctcatcggtggcccagttttctacatcggagtaatttgttataaaacactgttccgccaaaacccgtggacatggagaattttcaagtattccgaaacttttggcacttcttattttggcgtcggtgctgtcaactattattttgtttttgccggagtaaaaagcgtattttatgccgtctttgttttcgccacggagataatgcccccgttcctccatgtttttacaaagaattttggcgaatttaaggctgttttcgtggttggttcttcctttgggtattgggtaacattcaaaaccgtgggcgcttttgtggctgtcacagttggcgtgcaggcttattaaaaggcttgcaccgacctgttttgccacccggcacctttgccggctgtcagggtcgcttgttttatcccttgtaaaaacaggggtaaaattttcgtctttttcaagcaattcgtaaagcagctctccggttttttcaataacgtctatttcgtccactatgtgttgcgccccggtgtcaactccgccgtgtcctttgtcaacggctattacatatggcggcgaggaaatgtcaatactctccgcctttttgtcaatatcacaaacggctacgccgtaggctatttcgtttaaattccgccctaaaaatgtaaatgtaaaaagaacaaaaaacaaagccaaaacaaattttgttttcacttatacaccccctgtgataaattatatttaaaaaggggtgaataaatgacattgccggattgatacaatttatttttccgggttgtctattgcgtatataacccgagaaaaaccggcgataaccgcaaacaaaatcgcaccgcccatagcctcgtttaacaatgccccaataaaaagtccaataactgcggcaataatcataataatggcggaacaaacggttttaaattttttcattgcaaatctcctaaaaaaacgcccggggttttaccccgggcgattatggtttttaattattctgtgtagttgtcaactacatactgtgtaaagaattcaacaacaggtaagaagccattttcgtcaaggaagaactttgtgttgtgatggttagaagatgtgccctccaatgttgactgtgcgccgatctgaacatagcaagcaggtacgcccactgtcataaagctgaagtcgtcactgcccatattttcctcaggcatttcaacgtatttaagaccaacttcttccattgcttttatgcacttgtctgtaacggcgttgtcgttttcaacaggcaagcagtaagcgattttttcaatcttagctgttgcgccaaagctttcggctgtgttctttgcaatcttacccatcatatccaaaaccttgtcaaggtcctctgcgtggaagtaacggaggttgccctcgatataacattcgtcaggaatgatgttgtaagccgtgccgccgtgaatcatgcaagggctgataacaagggggctgaatgggctgaagtagtttgacggaatagttgtaacctgggtcaaaatctgagccgcaggtctgatcgggtcaactgctctgtcaggtcttgaaccgtggccgcctacgcctcttacggtaattctccactggcagttgcctgcgcacatagcgccgtgttttgaagcacctacgcctaccggcaacgggcctgcaatgtggttgccgataacctcgtcaacgccgccgggctgttctttaaggtaagccaaaatatcctgcgggccgccgccgctgatttcttcggcaatctggaagcaaaggtaaattgtacctgcgatgctgtcctgaatgtcaacaaggcattttgccgcagcaagcaatgtggatgcgtgtacatcgtggccgcaagcgtgcataacgccgggaacagttgatttgtattcccagtcgatttcttcctgcatcggcaaagcgtcgatgtctgcacggattgcaagggccttgcccggttttgcacctacgattttacctacaacatttctgttgcctacaacctcgtaaggaacacccattttgcccaattcttcctgaatgcgcttagatgtgttttcttcgtgcaagcccaattccgggtgcatgtggaaataatgacgaaggtcaagcatataatcttcgtacttttttgctaattcgtgaacgttcattttagttacactcctatacaatatttttatactgatattgtaccttttttaaggtacaatgtcaaataatacacaaaattataacaaaatatccgacagcgcccggaattgttccaagctcaccttttccgggcgaaccaacctgtctatgcccaaagtttcaagagcctgttcaatatcccctttcggtatgcccaatgtggcgctccggctgtttacaagggtttttctgcgctgggtaaagctggctcttataaggcggaacatatttttctcatttttcggctttatgtcattttccttttttacaacaagctttataacgctgcttgttactttcggcgcaggatagaaagagccgggggaaactgtaaagcacatttgcggatcggaataatactgtaccgccagggaaatagcccctatgtcacggctctgctgccgggcgcaaagtcgctgtgccgcctctttctgcaccataaccgttatgttttccacgcttaagcggtcttcaagcaatttcattatgattgggcttgttatgtagtacggcaggtttgcacacacaaccacaggtatccccttaaatttttcctctataagggcatttaagtccacattaagtacatcatcaaagataatctcaatgttgtcatattcccctaaggtttcctttaaaagctctttaaggtcggtgtctatttcgatagccacaactttttttgctctctttgccagctcggcggttaaaaccccaaccccggtgcctatttctataactccggtgttttcgtcaacgccggcgttgtctacaattctggggcaaaccgacgggtttatgataaagttttggccgaactttttttcaaaagtaaagccgtacttttggctcaattcctttatatatgataaattggttaaacttggcataaaattctctctgatttcataaattatttactatataatatcaaatataagcaaaatatgcaattattcaaagatatttaacaaaaaattattgattattttttgataatactttaaaattactacaacaagttatatacagaggatttttttatgataagagaaagagtaagtaaaataaattattatttggatattgccgaggcggtaagcgaaagaggcacctgcctgcgccgcaactacggggccattatagttaataatgacgaaattatatccacaggctatgttggagcccccagaggcagaaaaaattgcagcgacctgggcaagtgtatgagaatggagcttaacattccaagaggggaaagatatgaagtttgccgcagtgttcacgccgaggcaaatgcgattatctccgcaccgagaagcgaaatgcttgggggaacactttatctctgcggcaaggaagtaattgacggctcatatattaaaaacgcaaacagctgttcaatgtgtaaaagaatgattataaacgcaggtatttcaaaagtgattataagagattccaaaaccgatttcagggttatagatgttgaaagcgaatggataaacaacgacgaaagccttgagggtttgttcaactactaaaatacgaaagcagacggaaaaccgtctgctttttatatgggtttatttatgtttttctttccaccgcttaatatcttcaagtcttactttaaattttgcctcttgcccttgggttgttgggttgtaatactccctgcctaaaagggaatccggcaggcactgcatatttgtcagtttttccgccgtgtcatgggcatattggtatcccttgccgtagtcaaggtctttcataagttttgttaccccgttgcgtataacaagtggcaccggctcggcaagctgctttattgcgtcctttttggcactttcgtatgccatgtacagggaatttgactttggaactattgacatatacactacccgctgggtcaaatgtacagagcactccggcatgcctataaagtggcaggcctgataaacggaaaccgccaaatccaaggctctcgggtctgcaatgcccacatcttcgcttgcaaagcggataattctccttgcaatatacaaagggtcttccccggcttccaacattctggcaagccaatacacggctgcgtccgggtcggaatttctcattgatttgtgcaaagccgatataaggttgtagtgttcctccccctttttgtcatacaaaagggattttcttgaaatacactgttccaaggtctcatctgtaacgtagattttgtcgtcttttccctcgccgtttaaaaccgccatttccaaggtggacagtgcactgcgggcgtctccgtttgaaaaattggctatggcctctaaattttcatcgcttatctgcacatttaatccggcaaagcctttttcgcttgaaactgcgtttttcaaaagagttacaatttcatctgtcgtaaggggtttaagcacaaacactttacatcttgaaagcaaagctccgtttacttcaaatgatgggttctcggtggtggcgcctattaaaatgatactgcctttttccacaaagggcaaaaaggcgtcctgctgcgccttgttaaagcggtgaatttcgtccacaaaaacaatggttttttcaccgtagcggcggttttcctctgccttttccataacccggcgaatttcttttattccgctggtaacggcggaaaaatctataaatgcggcctttgttttgttggcgataatccttgccagggttgttttgcccacacccggcggcccccaaaatatcatggaggaaatattgtcgctttcaataagtcggcgcaaaattttgcccgggcctattaagtggctctggcctacatacccgtcaaaatcctccgggcgcagtcttgccgcaaggggaatttgccccggtttttcaaaaaaagatgtctgttccgtgttaatcacctcttgttattatgatatcacacaggtgggatttttccaatactgtcttgacttttaaaaatcccttttatataatcggagtatattttatttacggggaaaatttactatgaattatatgatttttgttgacggatcggcagatgtggatttgcaagctgtgggagaggaaaatataaaatttattcctatggagtacagcttggccggggaaatgcgagtttgcgacaccatgcaggatcggcaaacacttaaagatttttacaacggacagcgccggggagatttgacaaagacaacccagatttcgccctatatgtatgaagaatttttcagtccttatatggaaaaaggtatatccgttttgtatcttgccctttcaagcgggttgtcctcaacctacaattcggctttgatggcacgggaaaacttgaaagaaaaatatcccgatgcggaatttgtgcctgttgacagccttgggggtaccggcggcataggtgttttggcagagcgtgctttgagaaaccgccaaaagggtatgacaatagccgaaaacagggcggatttggtaaaggccgcaaagaaaatcaaacactggtttttggttcaggatttaaactacttaaagcgtgggggcagggtaagcgcaacaacggcttttgtaggctcggccttgaatataaagcccatacttgaaatcgaccaagatggcaaattgattacctttgctaaaaagagaggcaacaatgccgcagcggcggaacttgtggaaaagtttaaggaaagctatgacgaaagcggagaggatgttatatatattatagacgccgacgaccgggaacttggggatacattaaaggccgaagttttggaactttacccaaaccggacagtgagaagatgcactctctcccctataatcggcgcccacaccggccccggaatggcggctatatgccatatgggtaaataaagttgctatttgatataataatgttcggcggaatattatcttataatcggcttttgggataaaaataagcaagctatgttaaaaacagagcttgctttatattttaattgctataatatgtggttaaaattacaggaataaatcgtttgtttttcttttggaaagtttgcttttcatggccaattccgcagctgcaagcaacagagcaggcaattttcttgcgtgtaccgggcaggcggcaatacagcccatacatgatatacattttgttttgtctgcggtttttatatttgacgggtcaatggcgccaacagggcaaactcttacacacttgccgcagtttatacacttattgttccgttttggcacaacatttaagttgccaaggcgtttatattcgtggctgcctggtacaaaatactctgttgaaaaatcatcttttgcaagtttttctgttatcttttgagcaaaggcagtaagttcttttctgtcctcatcatccgggcggcctgcgccgaacttgcgcataatcgaatgttctgccgcagcccctattgatgcaacaggctcaaatccctgcaattttgcaacatccgtaagttctataaggccgtcgtcataagcacggttgccgtaaaccgcaacacaaacacattttgcgccgttgccctgtatctgtttaagtctttctatggcagtgcccggaataataccctcatataccggtgcggcaataacaacaaggctgtcattttcgattttactgtttgtaaaatctacaccgtatttggtaagatctattttctcgattgttttgccgaaagcgtcggccaaaatatctgcaaccttttttgtgccgcctgtggggctgaacactatttcagtaacatttttataatccataatttaacctccatgtgatgtaaaaaataaaattacaactaaaatatatcacagctaagttgtaatgtcaatagttacaacttagaatttacaatatcttaataatatgctatactttgaatgtaaaaggagcgtttgtatgcgattatctgtaaaattgtcagtggctgttcattgccttgtatttataagcgaatacggcgaaagcgccaaagtaacaggggaaagacttgccatgtccggggggacaaacccggttatagtcaggggaattttaagctctctgaaaaaggccgatataataaatgttaaaagcggaacaggcggcgcaaccttggctttgccgccggaaaaaataacactgggtatggtgtattccgcccttaaaacaaaggcagacggctgtatttttgcaaaacatacatctccctcccggctttgccctgtggggagaaatatatccgccgtacttgataaatcatacggcaaaattgaaaaacggtttgataaagaccttgaaaccataaccttggccgatattttagccgattaccatcttcggcttcgagaagaaaataaaaaatgattaagtaacggaaaaaagaaaaccgcaagtcgaaagacttgcggttttgttatttaggaaaatcttataatgttttaaaatccgtggaatgttttatcagtgaacctttgctttgacttcttcaaattccgcaacaatttcatcgccgggagcttttgtcaaaagtgaaacgactacgataaacaaacttgcaaccataaacgcaggtaacaattcgtaaatgccccaaaggccgcccataggcttaacaaggtacttccaaacaaataccatgataccgccgcttacaaggcctgcaaaggagccgtagaagttggttctcttccaaaaaagtgagaacaatacaacaggaccgaaagttgcgccaaagcccgcccatgcaaaggatacaatggtaaataccgaactgtcagggttccaagcaaggaaaagaccgattaacgcaatggccgcaaccgtaatgcgggcagccataagtgatgacttttcgctgagtttaatgtgcaacacatcggatatgatattttgtgaaaccgcagatgaggccgccaaaagctgtgagtcggcagtagacataattgatgccagtatgcctgccaaaacaacgccggcaattacggatgcaaggataccgtgctgtgccaaaatcattgaaagacggattattgttgtctcgctgtctgcggaatttgtaaagaaaggtattgcaccggctacggaacagctgtaacctataatgcctatgattattgctatcgccattgagataacaacccagattgaagcaattcttctggacattttaatttcgttttcatctctcatagccataaatctaaggagtatgtgtggcataccgaagtagccaagcccccaagccaaagttgaaacgattgtaataaaaccgtaatttgcggcttcacccgttgcaatgctgtaagtatgggtcattgaaaaatatcccggcaatgcccgtgcattttgaataaccgtctgccaaccccctgcggtgttgacgccgaacacaactattgcaataagggctacactcataactataccctggataaggtctgttgttgaaacagccataaagccgcccataatcgtgtacaatacaacaactattgcacccactatcattgatacatggtagtcaaagccgaaaagcgtattaaacattgtgccaagtgctttaaagccggaagccgtataaggaacaaagaacaagataatgataattgccgcaatgctcataagaacattctttttatcgtggtatctctttgagaaaaattcaggtattgtgatggcgttaagtcttattgagtatcttctcaatctctttgccaccaaaagccagtttaagtatgtgcctacgccgagaccgatggcagtccaggtaacatctgccaaaccggatatgtaagcaagacccggcaagcccataagcaggtagctgctcatgtccgaagcctctgcgctcattgccgcaacccaagggcccaagcctctgcctcccagataaaagctctctgcggagctctcgtttttatttccaaaatatatgcctattgcaaccatgcccaaaagatagacaatgattgaaacggctatgcctgtttgtgccataattttttcctccctgttttctttttctgaaaacagtagtgattataccaccctttttattagaacgcaacacagaacaaagtatagactaaatactgtacttatattttaaaaaatacaaaaaatccgctaaaatcagcggattttaaactgtacgattataaaaattttaaatcggataaaaaataaatttttaaattttattttgcacctttttatttgcaaagcagaaaataaattccggcagcattttccggctgtattggcttaaagaatattcgccgccgcaaaggcaccaatcgtacatcaacgccctttcgcacatggcgtaaattttaatcatctccccggaggacatagcctgggtcaactcccctttttcctggccgtcaacaataatttttctcaaaattttaaagtaaattctgtttttgtccaaaaggtgcttgttgcctgttgttataagctgtgtggaaagcagccttgtgagaagttctatgggaatgccgttttcaataagggaaaaaagttccctgttcaggtgaagtaatttttccatggctgtgggatagtttgcaagggtcggttcaagttcttcgtacttgtcgtcaaaaatattgctcaatgtgcctaaaagctcgtcttttcccccgaagtagtgatagaaggacccctttgatgtgccggactcgtctattatctcttcaatggttgtatcgtcatagccctgctcgtaaaacaatttccaggcggcattgattattttgctccttgtgtttcttgcgtttttctttgccataaattcactccctttgctttttatatatcataaaatacacagagtgaaatgtcaaagggtaaaatttcacttgcccttacaggagctgtaattgtataatgataatacaacagattgaggattaagtaatgaagaaaatttttgcggcacttttgtgccttttgatattatgtaccacggtgacagcccatgcagaggccgcacctgaaattgtaagtgaaaccgccgttgtcattgacgctggcaccgggcaggttttatatgataaaaatatgaaccggcaaatgtaccctgccagcataacaaaggttttaacggggcttttggcagtggaaaacggcaacctgtcggacactgtcacggtaggggaaacggcaatagccggaatagacggatccgtcagctatatggctttgcacccgggggaagaaataagccttgaagggcttatgtacggccttgccatagaaagtgccaatgacgccgcaaacgccatagcggaacacatatccggttcgatttcttcctttcgggacttgatgaacagccgtgccgcccgggcaggggccaaaaattcccactttgaaaaccccaacggcctgcacagcgaaaatcactacaccaccgcctatgatatggctatgataacaaggcggcggttggattcctaagatattcctt

SEQ ID NO: 4485 - DNA, 20568 bp, Unknown
  16S sequences of unknown bacteria
tactgcagaagcccgcaatttcgattgcgggctttttgtctcagcaaagagtccgaactccggctgggacaatgctttgcgaggatgcgaagcgattctaagaagaattgaggtggaatgatgcggattgggatgggctatgacgtacatcgtctggtagaaggaagaaaactgattctctgcggggtagagattccgtatgaaaaaggactgctcggacattccgatgcagatgtggcactgcatgcgatcatggatgcactgctcggggcagcggcactcggggatatcgggaagcatttcccggacaccgatccaaagtatgagggggcttccagtatgaagcttttgaaggcagtcaaagggctgctggatgagaagtgctttgtgatcgagaatattgatgcgacaatcatcgcgcagcgcccgaagctgcttccttatatggaagaaatgaagaaaaatgtggccggtgtgctggagcttacaatggaccgggtcaatatcaaagcgacgaccgaagagggacttggttttaccggaagcggagaggggatttccgcgcaggcggtgtgcctgctgcagccactgctcgatggtgtggcggattcccgcatgactccttccggatgcgccggctgtagcggctgtttgcgaaactgagaaaagaattgacaaagccatgtgagttgcttagactagagggtgttttacttatttctaataaacagtaaaaagggaatcctgagttcatgggaaagggacagcaaaatgagaatttttaatacagagacgaagagaaaagaagagttcgttccgctcgagccgggcaaagtgcgcatgtatgtgtgcggaccgaccgtttacaattttattcatatcggaaatgcacgtccgatgatcgtatttgacactgtgcgccgctatatggagtatcgtgggtatgaggtgaattatgtatcgaattttacggatgtagacgataagatcatcgcaaaggccaatgaggagggggtaagtgcccaggagatttccgagcgttacatcgcagaatgtaaaaaggatatggccggcatgaatgtgaagccggcgacgacgcatccgctcgccacacaggagatcgacggcatgatcgacatgattcagacgctgatcgataaaggctacgcatacaatgtgaatggtaccgtctatttccgtaccagaaaattcaaggattacggaaagctttctcataagaatctggatgacctgcgcgcaggcaaccgttcccttctcgtgaccggtgaggaccagaaggaggatccgctggatttcgtactgtggaagccgaaaaaagaaggagagccgtcctggcagtctccgtggagtgatggccgtccgggctggcatatcgagtgctccgttatgtcgaagaagtaccttggcgagcagatcgacatccatgcaggcggagaggatctgatcttcccacatcatgaaaatgagattgcgcagagtgagtgctgcaatggcaagattttttccaaatattggatgcataacgcatttctgaacattgacaaccgcaagatgtccaaatcgcttggcaatttctttaccgtgcgtgagatttctgagaaatatgatctgcaggtgctgcggttcttcatgctcaatgcacattacagaagtccgctcaacttcagtgcagagctcatggagtcttccaaaaatgcactggagcgtatccgcaatgcggcagcgaatctgaagtacacagaggagcatgcgcaggcagagaccatgagtgaggcagagcagcagctggcggcaggcatttcagaatatcggaaaaagtttgaagaggcgatggacgatgatttcaatacggccgatgcgcttgcagcgatctttgagctcgtcaaatttgcgaacagcaatgtgaacgagaacagctcccgtgcgtttgcgaagctgctccgagatgagattctgcagctgatggatgtcatgggactgatcgcagagccgaaggaagagctgctggatgcggacattgaaaagctgatcgaggagcgtcaggcggcgcgcaaggcaaagaactttgcacgtgccgatgagatccgcaacgagcttctggaaaagggcatcacacttctcgacacgagagaaggagtaaaatggaaaagagcataatttctctggaggacagcctggatagcgtattcgggctgtcctctaaagactggaagctgtattccccgctgacgctggcatatctgggggatgcagtctatgagatggtgattcgtacgatctgcgtcaagcgtacgaatatgcagactcagaagctgcaccggaaggtgacaggctacgtcagcgcgaaggcacaggcgaagatgatggacgccctgataggagagctgaccgaagaagaggagagcatttaccgcaggggccgcaactccaagccgtatacaaaggcgaaaaatgcgagcatggaggagtatctgaaggcgaccggatttgaggcgctggtcgggtatctatatctgcaaaaggaatatgagagaatgaacgccctgatcgcgcatgggatcgaagcattgcaggaaaaataaagttataatggaggccgcatggagaaggcggtagaaaagagagaagatatgagaaaaacagagcaggaccggagtcggcgcagaccggagcggcgtgacggtaataccggaagaggcagagcagaaggctacggtgcaagaaaggaacgcaccgggagtgaccggacggaaatccatggaagacatgggcaggcagccggaggggagttccggaaacagaagtatgatagaagcgcagaatatctggcagcggcagatacagacggagcagcggcgcaggaagacggacggatcattgaggggcgcaatgccgtgctcgaagcgttccgttccggcaagacgattgaccgtctgctgattcaggacggctgtcaggatggaccgattcagacgatcaagcgtgaggcaaagcgctgcggtaccatcatggactttgtaccgcgggaacgtctcgaccagatttcacagaccggtgttcatcagggggttgtcgcttatgtggcagcctacgaatatgcagaggtagaggatattctggcaaaagcaaaggaaaagggcgaggatccgttcattatcctgctggatgacattgaggatccgcacaatcttggcgcgatcatccgtaccgcaaatcttgcgggcgcacatggcgttatcattccgaagcgccgggcagtcgggctgaccgcgacagttgcacgtacatcggcaggcgcactgaactacacgccggtagcgcgtgtgacgaaccttggtgccacaattgaccagctcaaaaaggaaggcatctggtttgtctgcgcagatatgaacggcgagatcatgtacaggcagaacctgaccgggccgatcgggctggtgatcggaaacgaaggggacggcgtgagtcgccttgtaaaggaaaaatgtgatttcactgcgtcgattccgatgaagggggatattgattccttaaatgcatcggtggcgaccggcgtactggcatttgagatcgtacgtcagcgcggatttgtaaaataaaaatcgggcggcaggctcacggacagagatgtgggctgccgcctgttctgacatggagggaatatgaagcgggatgcatggtggatggatcgcgtccccggacgcatgaaacaggcttttcaacggattgaagcacatatgacagcatcgcagattatggtgacgggctttgcactggcaatcttcgcaggaggaatccttctgtcgatgcctttttgcaatgcagatgggcactggctgcgctttatcgatgcactgtttaccgcgtgctcagccgtatgtgtgaccggactcgtaacgatcgttccggcaacgcagtttacactgaccggcaaggtgatcctgctgattttaattcagcttggcgggcttggcatcatcgcctgtacgatgggaacgttccttattttaaggaaacagatcacgattcgcagccgcgtgatgattcaggacagctatgatctgcattcaatgaccggaattgttatactgctgcgctatgtgatccgcggcacgtttttcgtagagggctgcggagctgtgctttatgctgtgcgctttatcccgcagtatggtctgctgcgcggtctctggtatgcgctatttcatgccatctccgcattctgcaatgccggaattgacattctcggcgagacgagcctgcagcagtatgtcgcagatccatatataaacgtggtaacgatactgattattgttgtgagcggactcggatttctggtgtggaaggacctgatgctggctgcatcgcgtttgtaccatcgggaatatccgctttgccgggtgatccagaagctgaagctgcacacgaagctggcgcttgtgatgacggtctcgctggttgcgatcggtacagtcggaattttctgcatggaatattcgaatccgaggaccttaggcgggatgccggtcggagaaaaatggctggcggcaatgttccagtcggtgacgacgcggaccgcgggattttttacaatcccacaggatcgtttcctgccgcagtcacagctgctctcgtgtattctgatgtttatcggcggtagcccgggaggaaccgcaggcggcatcaagacgacgacgatcgcgatcctgtatctgacctgctggtcggtgctcaagggtacggaggacaccgagtgcttccggcgcaggatgccggcagcgaatgtacggacggcattttccgtgctcacggtcgctgggactgccgtgctcacagggacgatgctgattctcgtgcttgagcacaccggactgatcccggcgttttatgaggtcgtatcggcagtcgggacggttggcctgaccgcaggcctgacgccggtgctcacgacggccggaaagcttgtaattattgtgctcatgtatatggggcgcttaagcccggtgactttggcactgctctttgcatcccggtataaaaagcacgggaaaggccggaagcttccggaagaacggattatggtcggatagccggcaggagacacgggcatccggtaatcaaacagcgaagcagagtattcgcgggaaagaaggtaacatgaaaaaacagtatgtggtattcggcgcaggccgttttggaagaagtattgcggtgaccttacagagccgcggctgcgaggtgattgtcgtggaccgggatccggaggtgatcgaggacatcgcagatgaagtcagctatgccatctgtgcgaacgtcgaggatccggatatttttgccgatcttggcatgaaaaatctggacggtgcgattgtggcaatcacggagagtctggaggccagcattgtgacgacgatgatgtgccatgaaatggggattccgcggattatggcgaaggcaaggaatgagatgcatgaaaaaattctccgaaaggtcggcgcgacccgtgtgatgtacccggaggttgagatgggacgaagggtggcaaaatatattgtggcggacaattttgccgactggatcgagctgtccccgaagtacagcctggtggaaatggcaatcccgtcagcctggatcggcagaagtatccggacgcttggaattcgcgaaaagtatcatctgaacgtagttggtattaaaaacggggatgaaatgcgtgtaaaaatcgatccggaggctccgcttttaaaagaagaggtactgattgtcgtcggagaggatgcggacctgcagcagttccagaactgacgcagccggatggaaaggaaaatgtcttgaagaaatatggaaaagattaccggagggctgcagacggctatgagtatatcggaagctggtataaaacgtcgctgaccggagatgctttaaagaaagaggcacgttttttctggatttgccttgccgtgatgtcagtacagtttgtgctcggtctttcactcaataatgcagggagccggatactttggattctgttgccgtttgtagcgctgtttcttccgttattatacggatggatgggaagtgcaaagctgtatggaattggaaaacgtctggaaaacgcccgtgcaaatcaggcggcttcggacgccttgcaggtacagattccaaaggcacatcggagccatctgcgccgctcggaatacgagcagtcgttccgtcgtctgctgcgcagctttgtggccggggcagtgctgtccaacgctgtttttctcgcggatattcttgtgctggtcagtaatgccgcgcttggttcggtggcaggcgaggctgtttttgcaggaaatgcggctgtcctggcagttctgaatctggtctgtgcggtgaaaagctggaaggtgcatgcgtctgtccgcgcagaaaatgaagtgtccgcgccagaaggacattacaacgaaaacgtacctaaaaactgacaaaaatgctaaaaaaacgtaaaaaatgcaggcaaaaatatacaaaaattccgttttcttgacgctctgcaaggattgtccattgaaatatattcaaaaaatgttatagtatagaggtacttattgtgacggggaggacggggaagaccagcttgtttttttctgacaaacgaataagtgaataaaaaaaaggaggatatagcatgaagatgaaaaaggttctgtcactgatcatggcaggcgcaatggtacttggaacgatgagcatgagcgcattcgcagaagagaccgaggcagccagtgaagcgacaacagaggccggcagcacagctgcggcagacacgacaggggggactacaccgcttgtagtcggcagcctgaatttctcagagaaattcagcgcattttttgcagaatccgtaccggatcagacgattgtcaatctgacaaatctgtatctgatcgaaaacgaccgttccggcagcattatttacaacggtgcaaatccggagggcgagacgatcgcgtacaatggcacggattacacgtaccatacactggcgaatgttaccgttaccgagaacgaggacaacaccgtgtacaatctgaagctgcgtgatgatgtcgtattttcagacggcacaccgctgaccgcagatgatgtcattttctccatgtacgtatattctgatatggattatgacggatatgcaaccttcagcggaactccgattaagggacttcagaattaccgtctgaactccactgtagcggattccatcacagatgaggatgttgcggcagcactgacggaaatgccggagggcctggctgcttctgtaaaagaggcaatgaaggaactgcttgattctgagtatgactgggcagatgctgcatgggaggattactccgcagattacggtgtaaacagcggagcagagttctttgcactgctttacggcccggaggactacagtgtagaggggaaagaccgcgagacgatcgtgaacgacgttcttgagaattatggcaccgattatgctgcgctggcagcagcatacggagatgaggcttactttgatgagaccgttgcggaacttgcaaaggaatacctggtagcagagaagaccgctgcaggtgaaggcgaagaggtaccgaatattgaaggtatcaagaagcttggcgattatgagatcgaagtaacgaccgatggctttgatgcgactaccatttatcagctcggactgatagtctctccgcttagctactatggtgatccggcgctgtatgattatgacaacaatcagttcggctttaccagaggcgacctttccgcagtacgcgagaagaccgccaagccgatgggcgcaggcgcatacaagtttgtaaaatatgagaataagaccgtttatctggaagcaaacgagaattactataagggcgagccgaagatcaagaacatgcagcttcgtgagtccgcagatgctgactttatcccgggcgtagagcagggtacgatcgacctggcagatccgagcggaagcaagtctgcatttgagcagatcaagagcatcaactccaacggtgagctggatggcgaccgcatcaataccagcctggtagacaaccttggctacggctacatcggtatgaatgcaaataatgtctgtgtaggcgacgagccgggaagcgatgcctccaagaatcttcgtaaggcaattgcaacggttcttgctgtatatcgtgacgtaacgatcgattcctactacggagacgcagcagcagtcatcaactacccgatctccaatacctcctgggcagcaccgcagaagtctgatgcagactatgaggtggcattctccaaggacgttgaaggcaacccgatttatacagatgatatgaccgatgatgagaagttcgcagcagcgcttgaggcggcaaagggcttcttcgcagcagcaggctacaccttcggtgatgacggaaagatgactgcagctccagccggcgcaaagctttcctacgaggttatgatcggtgcagccggtaccggtgatcatccgtccttcgcaatcctgaccgatgcaaaggcagcacttgcaactatcggctttgatcttgagatcaacgatattacagattcaaatatcatgtgggatgcaaacaatgcaggtacgagcgaactgtggtgtgcagcatggcaggcaaccctggatccggatatggttcagatctaccacagcacaaagggaagctctaaccattaccgcatcgcggatgagacgctggatgcagacatcatggatgcaagatcaaccgctgatcaggcatatcgtaagtctgtatacaagcagtgcctggatatcattatggactgggccgtagagattccggtataccagagacagaattgtgtcatctacagtacggagcgtatcaatgcagatacctttactccggatgtgacgacctactacaactggtatgcagatgtagagaatatggaaatgaactaactgacggaaacggaagcagacagcagtactgcgaagaggttttgcgcagtaccggctgtcaatgaaaaagggatgacagcccaccggatggtgggctgttgtacgcaatacagagcgtacagcaaaagggttcctggacaggcgtctgtggtcggaatacctcagagaaccgggaaaacggtactctgaggcattccgatcattgaaacagatcagaaaaaaccggaaaggagaagcaattgcatgaaaaaatttgtaatacggcggggattgcttggcatagtgattctgttttttgtatcactgattatttattcgattgagcgcagcctgccgacttcttatgtaaaaggaaaagcgatggcgatgtcgcagaaacagggtgccaagccttatgaggagctgctggcagatctgaacgcctcctacggactggataagccggtactggagggttattttgtatggctgaaggatgccgttcgcggtgacttcggagagtcctgggtttggacacagccggtaacacagaaatttgccaatgttatctggtattcctttgccctaagtgcggtggcgtttgttctggaaatcatgatagcgattccgcttggaattatttccgcgacaaagcagtacagcaaggcggactatgcggtgacggtattcgcgctgatcggcatttccctgccaacgtttttctttgcgacgatcctgaaatggattttctccatcaatcttggatggttcgacctgtatggtatcgtcgggcgtatgcatgagacgtacggaagcgtcggaaaggtactggatatggcaaaacatatggtacttccgatcgtgacactcacgattgtcagtgtcggatccctgatgcgttatacccgtaccaacatgctggaggtgctcaacgcagattacatccgtactgcacgggcaaagggcctgccggagaagaaggtcatctaccaccatgcattccgcaatacgctgatcccgatcattacgattctcggaagctcacttccgggtctgttcggaggagccatgatcacagagacactgttccagattccgggaatcggttatacctcttaccagtgtctggtgcagggagatattccgtttacgatgttctacatgacatttcttgcagtactgacgctgctgggcaacctgcttgcagatattctgtatgcagtagctgacccgcgtgtcagaatcaactagaagggagagagaaaatgagcgacaataaaaatacagcgactgcgctggatgatgaacgccgggtaaaggtactctctccggggcagctggtagcaaagcgttttttccgtaaccgtctggcaatggtcggactgattattctggttacgatgtttgttttctccttcatcggaggaatggtgagtccgtacggtgagagtgaggtgttccggaaaacggaggcgacctggaaggattatgccggtgcgggctacaacagcaatttcattttccggtctgtagacggacaggagcttccggctgcggcgcagcagaaatttatcctggcagtcaataagtcacaggagagctttgatgcagacggagtgacctacatgctggaaaaatgtggggaggatttttatacgctttcctcacagcaggcacttgcaaccgtactgacattaaagggaaaatcctcctttaaggaaattggagatgcgacggtgacggatgcaatcaaaaaagcctacgaggaggcatccgaaaaggaagagacgacctttgaggcggatggtcagacgtacttcattagcaaatccggaagagaggagacgatttccggaggaggcgagatcgcgctggcgaccaaaaaggtattcaacgcagcgaaggcagataccggaagtgactatgcttttgagaaggaagccttgctggcaagtgaggcaaatgcatcgacctttacctgtgacggtgagacgtatgatatgcagatactggaaaacggtgcgacagagatttcaaaggatggagaaatctatgcgacgatttcaaatctgcttgtatctccgcaggcgagcggaaccttcctgtcactggagtttaaggaagcggcggagcaggcgattctggcaaaggaaaaaacctttacggcagcagatgagtccggcgaagaaatcacctatcagcttcagaataagaatcagcagtatattatccgtgtgcagaagcagaccacagtgaatgatacctatcataagccgtcagtgaagcactggcttggaacggacggaaacggtatggatatgctgacccgtctgatgtacggcggacgtatttccctgatgatcggttttgtcgttatcgtgatcgagattgtccttggtattatcatcggcggctgctccggctatttcggcggctgggtggataccttactgatgcgtgtcgtggatgtcgtaatctgtatcccggcaatgccgctgtatattatcatcggttccatcatggattactacaaggtcgatccgcgtctgcgaatctatgccctgtgtatcatcctcggactgatcggctggccgggcattgcacgtatggtccgcggacagatcctctcccttcgtgagcaggagttcatgatcgcgacagaggcgaccggagtgcgtatatcccggagaattttccgccatctgatcccgaatgtcatcccgcagctgatcgtcattgcgacgatgggacttggcgatgtcatcctgatggaggcgaccctgagctttttgggaatcggtgtaaaattcccgtatgcgtcctggggaaatatcgtcaatgcggtaaatgatgtctatgtactgacgaacttctggtttgtatggattccggccggtttcctgattctgattacggtacttggatttaatttcgtgggcgatggcttaagagatgcctttgacccgaagatgaaacggtaggtgtgcatatgggactgtttggaaagaaaaatgagaactacatttcctcaaaggagacaaagcggatctcaaaggagaaccgccggatcaccggggagattgaaaaaaagcggaaccggaaaaatattccggaatctgaatatatcactaagatgaagaatccggataacgtcgtggagttcgacaatgtccacacatatttctttaccgatatcggaaccgtcaaggcagtggacggtgtttcctttgaggtgccgcagggcaagacggtaggaatcgtaggagagagcggctgcggaaaatccgttacgagcctttctctgatgcagctcgtacagcgcccgcagggacagacggtagaaggggagatccgtttcaacaacggagataaggtctacaacatcgtcaacacgccgatcacagagatgcagaagctgcgcggcaacgcaatgtctatgatcttccaggagccgatgacctccttaaatccggtattccggatcggggaacaggtggatgagatcgtcgcactgcacaatccgactatgagcaaggaggaagtcaaggcgcgtacgattgagatgctcaagctggttggtatcgcaaacagcgacggcgtctatcggatgtatccgcacgagctctctggaggtatgcgtcagcgtatctgtatcgcgatcggtctggcgtgcaacccgcgtctgatcatcgccgatgagccgacaacggcactcgatgtgacgattcaggcacagatcctggatctgatgcgcaacctgaaggacaagatcaattcctcgatcatgctgatcacacatgacctcggtgttatcgcagagatggcagactatgtcgttgtcatgtacgcaggacgtgtcgtggaaaagggaaccgcgcgggagatctttaagaatccgtcgcatccatatacgatcggactgatgcgttccaagccggtagtcggcaagcaggtcgacaagctctacagcattccgggcaaggtaccgaatccgatcaacatgccggactactgctacttcaaggatcgctgcgagctctgctgcgagaaatgctccggcagctatccgggcgttatcaagctcagcccgacacatgaggtcagctgctaccggtacgcagaccgtccggaggcaggatggctgatgggagaacatctcggaaaggagggcgcttccgaacggtaaaaaaggtgttccggtcagagacagcatgacagctgccggccgggaatgcaaaggtccgcatataagccggagacaccggtgatatgtgggaaatttcgggagtagaattgactatgacagaaaagaagaataaaacaacgcaggaagcggataacatcctcgaggtgtcccacctgaaaaaatattttccgatcaagggcggcatgtttggccgtcaggtcggagcggtcaaggcagtcgacgacgtttcttttaccttaaagcgaggtacgacgatgggactggtcggcgagagcggctgtggtaagtcgacgaccggacgcacgatcctgcgtctgatcgaaaagacagacggacaggtactgttcaacggtaaggatgtctatggactgtcaaataaagaaatgcgggatatgcgtacaaagatgcagatcattttccaggatccgtactcctccttatccccgcgtctgccggtcggtgagatcatcggcgaggcagtaaaggagcacaatctggtaccgaaaaacgagtatcaggattatattacaaagattatgaatgactgcggactgcagagctatcacaaggatcgctacccgcatgagttctccggcggacagcgtcagcgtatctgcatcgcgcgtgcactggccctgaatccggagtttgtagtctgtgatgagccggtatctgcgctggacgtatccgtgcaggcacaaatcatcaacctgctgaagaccctgcaggaggagcggaatctgacgtatctcttcatctctcatgacctctccgtcgtagagcacatctccgattcgatcggtgtcatgtatcttggcggccttgtggagaccggagcgaccgaggacattttcgcaaatccgctgcatccgtacacacaggcgcttttctccgcgattccgatgccggatccggatctgaagcggaaccgtatcatcctggaaggaagcatcccgtccccggccaatccgccgaagggctgcaagttccacacccgctgcagccgctgcatggagtgctgcaagacagaagagccaaaggcaaaggacatggggaacggacatgttgtaaagtgccatctgtacgattgagtatagctgccagttttctttgacggaagactggcagttcttgtatacaggctgatacgaagaatcagacagaagatataaaagtaagcgctgagaaatcagagaggaagaaaaggagaagcggataaaaatgaaggaaaaaaagaaaaaacgcagacaggaggagcttcctgattataccgttgcgcacatggatgtcgatggcatgccgtggaattcaaagcgtccgtggcagcttctgccgggagaccctgcaagggagagtcggaaaaagagaagtcttcaatatgcagagccggatgatgcacaacaggatggcgaggatgcactttccgcatttctcgcagaacaaaaacaggacgagctgacaaaggaagaacgtcgctctcttgtctggctcgccctgaaggcttctctggcagtcggcggtgtgtttgtgctggctgcgtttctgtttcttttattttgtgtaaatgtatggtttcaataaaaaaggaaagtagcggcgtggcgaagtctgcaaatatcgggtttaatccgcatgcggctcgatcagaaagcacggctctgccattgtccgctccatgatcacggcctcgcgcagtgccgggtctgacatctcgtagtagtcggaaccggtgcggttcagccgctcaatggaaacgctgcggttcgcgcgcttcggcatgtcgtagagaaaatgaatctcatcggtgcggtattcctcgtcgaattccgggtcgtcctcctcttcgtaatacgggtcaaagagcagcacccgcccgtcatcggtcagcccggtcagcaggacatagtgcgggcattcgagaatcaggcgaacctgaacagccgcgcctcttttgagcgcctcatacaccggggatcccggaaggagcgtcacctcatcaccggagagaaattcgcagtggatcggaaagcagcgcgtctctgcgaaatgattcatccagttcgtgagataatgcatcgccgctgccgaagtgccgcgccgacacagctcgcccttcgtattatacgtgtccagcgtgtagagcataataaattttacaatatccgggaaaatctcctcccggtcaaaaagatagcggacgccattcagaaacgaaaccggtccgcagtcatattcactggtctgatagtttaaaacatttttcataagtaaatcccgcctgttttctcataagaattattctcaactactgtatcgtctgcaggatgatttgtcaagatttaactgtgaatctaacttttacttttatgataatgccgggagaattcagcaaagaaagaaacgatacttcgacggatgaaactaaaaacaagataaaagacaaaggtaaaaaggaagaaatattgaggcaaccagtcaatccccacattaggctgacacaggcagtcaataaaattcaggtgaagcagattcgtattcaggtaaattcggatgcaagggataaagaaaccataatcatacccatataattgcataccactggctgttccagaggcttcctgacctaaaagaagacagaagaagaaaacacataccagagcatattccttccatgaaagttttaaggtatcagagaatgcaagaaaaatttttttgaacgcgtatatcataaatgaaccctcctgcaacataagataactctcgaatgagaaaataagactgagtatttgaagaatctcagtcttattttcaagtttaagatttaagatagaaattaaaagaataagttctgttttgcgataaaattttgcctatgccatttacaatgatataggtatctagaactcccgttaatgtaatcgttagatgtcttcttgttgaagtaaatgatttgtttgcacgtcgctgcttccacgaaaagtttacaggaaagcggattccggttagccaagatttaatattggaaacatttttgaaaaagtaataaccgacttgtgctttgtttttggtatatgtaaattcgcagttaatataaacaggaggcacaggaataggatttactcctatcgttttctttgaactcatcgttgcccgggtggatggggtaggaatatcttcaatacaatcagttagatcggttgttccggcatcaaaattttttaggtattcatcaagatcatttacaacaatgggttgaatatctccggaactgattttttcttgttcttcggcagttagttcacgaatgcccgggatgtcgcaagtaacagaagctttgtcgcatatgatgtcagaagattcatcttttgccatagaagtaattaaaggagaaaagcttgttaattgtgagtaggtagcagagatgtttaacaatgtttttcatggtagaatcctcctgttgagtggttagttaaaaaaatccggattttggatctgcatccgttgagtaataaaatttccattttcattaaccgcaaagacttcttcaacgtcgaaaagaacgctttggtcatctggatttaagggatgaatttgaacaatatctccaatttcaatatttgagtaccaagactttaattgatctttagaaaaaatagtggtttctttttgttcccaggtggtgagaagaagatcatctgcatttttgtaattagatagtgcatacagattgtttttctgaaaccattcaccaagtggcaaaacatcaaaagtattatcagaatttagatttaaaatgatgtctttttctttcatgttgagatagatagaagatgtgtaaatatcatatacatttagattatctaagatatttacctttttgctgttttcaacagaatctgcttccttggcagcgaaggatggaaaagttgctgtgcccattagagccagaactgcaaaaacagtaagaatcggttttttgaccattttattcaccagctttctgctttgacaatgactgaaagtgcgtcgcccctcctttcatctatatttttaattttaatataagtgcaaattcttaaaatttttgctatataattcttaacagttcttaacaaagaaatatctggtgaaaccgagcgttcgaagaagattcacaccggttgggggatggggatttttggaaaaaagagacgaagggaaaaagagtgctcctgatttataatgtcgatttttccattcattttcatcatcatattttttacactgataagaccggtttttgaactggaagtaaatgcagaaggcaattttttagtgtttgtaaaagataatatttcgtaggtgtcattgtaagaggttgtaacataaatgttttgctttgaagaggcgtatttgataatatttgaagaaatgttatcgaatatgcgaacaagataatcataatttatacaaacttttgattcatcccatttaaagcgtagaattgtcctaaatccattttgtgacagatactcggataaagaagataaaaaatcataaatagtttctttaaataattcagaaaattctaaggagaccattggttcttggttaattaaagaatattcaaatatatgatcagcctgttgctttaattgatgaagcttgatatcaattttttcaatataatgctgagcttctgtattacattcagggcaaagatcgtgaagaaattttatatataagagcagggaagtcaaaggtgtacggaggtcatgagacatttcgcggatcattcgttgattttcctggacagcaagggtttcttttttaatctgatcttttaatgcttttcgcatattatcaaggctgttggccagtgtaaaaagttcatctgtaccttttactgaaatgcaataatctaaatctccgctttccagtatttgaatttcgtgattcagaataagaatatattttatttttgacttgataaaaataaggagagcaaaaataaaaatcagaaaacacagaactaaaataataaattttattccggcataaagtttccagacgtttgcaccggcaatatatacttcagcattgatatcagcaaaagataaaaaaaagttgtcgcgccatacagaaaaataggactcttctttttccatgtcattatcgccgaaattatcccattcatataagagatttccattatcgtaaagttgaagaagggatatctgagaagagtttagatatggggtgagagaggtaagatcagctgtagataagtgtttatcagtgataaatttctgtaaacgttctatctgtacagagcgccagaggtgatcatagtttgttttcttcagataggcgttaaggctatgatcacagaagctagacagaaagaaaaacagaaataatgaaaatgcagcagaaaaaatgatatgagttataagttgaccatatagagaattattgattttcttcatgaaatttgtatcctttcccccatactgtctgaattaagcagggattgcttggtgtttcttcaattttctttcgtaatttgcgtatatgaaccattactgtaccattacatgaatagaaatagggttcattccatatttgttcatataaaacctgtgtggggtaaatacgcccggggtgtttgataaaaagtaataataattgaaattcaatacttgtcagatttatttcctttccattgatggatacggtgcctttttcctcatttaccagaatgttacctgaatgaatgatatgggattcaattgaagggcatttccaggattggttatattttcggtatctgcgaataagcgcttttattcttcctaatagttctgcacatgaaaatggttttgtaagataatcatcacctcctgccattagaccaagtaatttatctgattcttgcactctggcggtcagaaacagaacaggaacagtggaatgttgtcttaatttttcacaggtcttaaggccggacataccaggcatcatgatatctaaaataacaagatcggtatcttcggtgagaagttgtaatccatttacaccatttgcagcttctgtgactgtatagccatcattttcgagcaataatcggattacttctcgaatgtcagggtcatcctcaataattagaatgttgttcaaaacatatttcctccaaactttaaaaacttatataataatttcattaaactttatatctgatttttgattatccctataaatattacactttcaagcatttcgaagtatagaaaaacactcattttaccacgaatataccacgattgaacgagccttgatatgacgataaaatagcactaaaaagacaccattgacacattgaagtggtgtcttttattaataagcagtcaatcctaagactaactgcttttgcaaaataaaggtaatcactattttgtttgtttctttagaataatatagcttgcaatcacaactacaaagaatactaacacgaaaactaaagtatgaaatattcctatcggataaggtgcaatccacccttctagtttgaaaaccaatcctgaaatatatcctgtaatcatagaaataggcataaaagcaactccgattatattaagccaatttacataaaagggggatttttcttccgatagtattctcgctataaaatatccaacaatccctatagcttgaataatcattgaaccccaaactgcttccattgtttgttctgcataccaattaccaaatgcacaaaacagcccaatagcaacaaaagctgttgatgatatataaagtaccttactcgtaagctctttatttttttgttctttgtctgctactggttcaattccctttaggatatagtcagttgttactccaaaaaaatcactcattataattattttttctaagtcaggcgtactttgttcactttcccatttagaaacagcctgccttgaaactccaactttatccgcaagttcctcttgtgatattccttttgatttccttaaatattgtattctgtctgccatattcattagctaacactcctttctttcatggtgtaattttagcaatattatcagttgcatagccaccatttagatatggaaatatgtcaactggcagttgcaatgatgttttttgacaaatcagcagaatattcttgcttataacgtaatttaaacatatccatattataacagttccatatatccgccacaacaaaaatcagcacacccccccttgacatttttctgtcttgaaaaatacacactttttctttcttcctcttgattaccaaccacagaaaagaaaaagccctgtcaagagccttgccaccattggtggtgctttgcactcttta

SEQ ID NO: 4486 - DNA, 32759 bp, Unknown
  16S sequences of unknown bacteria
aatgccagaaatgacgtacatgccgtcatttctgattagagcctcgttcttccgatactttgtcaatgctctgtgtcggcgaaactgactgagggattgtcctcgcacacgatcacccgtctccgggatagggaagcggaatttgcgcggcccggccgctttggccgggccgcgcctatgcagaaccgagaggagagaaatacccatgcccgtaaaagtgcccaacaacctgccggctgtgcaggtgcttcgcgatgagaacatctttgtgatgacggaggagcgcgccaccgcgcaggacatccgtcctctgcgcattgcaatactgaacctaatgcccaccaaggaagttacggaagcgcagcttttgcgcgtgatcggcaacacgccgctgcaggtggaagtcacgctgttgcgcacggccacgcatcagtcgcgcaacacgtcttccacgcacctcgcttctttttatcagacctttgaggatgtgcgcgaggaaaagttcgatggcctggtgatcactggcgcgcccgtggagcagatggaatttgaggaagtgaactattggcgcgagctcacccagatcatcgattgggcggaaaagcacgtgttttccacgctgtatatctgctgggcggcgcaggcgggcctgtattatcattatggcgtccgcaaatatccgctgcgggaaaagtgctttggcgtgttcgagcaccgggtgcttttgcccaaccatccgttgatgcgcgggtttgacgcggcgttttacgcgccgcattcccggcacaccgaggtgcgcgccgcggatgtggaaaagacggaagggctgctcctgctctccgtgagcgatgaggcgggcgtgtacatcgccgccacgccgcaaggcgagcgcgtgttcgtgaccgggcattcggaatacgaccccaatacgctgcgactggaatacgagcgcgacaaaagcaggggcctcaagatcgccgtaccgaaaaactatttccccggcgacgatcccaccaagcccccgctggtgcgctggcgcgcgcattcgaatttgctgtttcagaattggctcaactattgcgtgtatcagcgcacgccgtttgattacatgtccatcgggcaggcgccgggcacgccagtgtagtgcaggcgcacacgggcgtttacgccccgttcgaagagcagcggcagcgggctgagcatttgcgcctcttcaatggctgcgatggcggcttcgtcgtcgagcccttccagggagagcacggcggcgttggtatcgtcgtccaggtcgaggagcgcatcggcgtcttctgcgcgttcggcgcggatgtcctcttcctttagccacttgcgcgcgctggcgatatagcgcggcaaaacgcgcttttccggcgcggggcaggcgatggggcgcatggccgcgatgtgctcgggccgcgtgccgcagcagccaccgatggcgttcgcgccgttttccgccaggcgcgccatggcctgcgccatggcttcgggcgagtaggggtagaccacgcgcccgtccaccagcgcgggcaggcccgcgttgggctgcaccacgatgggcaaattggtcaccgcgcgcatgcggcggagcggttcaagcatctcttccggcccgccggagcagttgatgccgatggcgtccgcgcccgcgtgctcaaggatcagcgcgcagcattcgggcggattgcccgtgagcgtgcgcgcgtttttttcgaacgtcatggaagcgatcacaggcaggcccgtttccttggcggcgatcacggccgcgcggcattcgcccgcgtccgccatggtttcgatgatgacgccgtccgcgcccgcgcgcgcgccggcctgtgcgcaggcgcggaacacctggatcatttcctccaggccgatgttccccgcggggcgcaggaattcgccggtgggcccgatatcgagcagcgcgaaattgcccgcctcgcgcgcgagcgcaacgcctttctcaatcagttcatcgagccggttttccagccccagcgcgcgtagcttgatggggttcgcgccaaacgtgttggcgatggaaacgtccgccccggcggcgcggtagtcctggtggatggcgcggatcaacgcgggattttccgcgttgagcagcgcagggcaattcgtggtcacgccgcgcgcctcaatcagcgcgcccatgctcccatcaaatagcaacccgccgttttgcaggcgggccaaaaaatcgttcatgggcagtggcctcccttccggtttcaatcgaattataacatatttttcggctagaagcaattctggggcgggcaggcgtcttgcaaatttttcaaaactatgctaaaatcattgctggaattgtacgggtgagcaggagggtattttcagatgagtgcaaccgtagaaaaattgagccaagttaagagcaagatcacgatcaccgtggatgcggatacctttgaaaagagcatggaaaaggcgttccgcaaaacgatgaagcgctataacataccgggtttccgcaagggacacgcgccgcgcgcgctggtggaacgctattatggtccgggcgtgctgtatgaagacgcgtttgaaatcgcgttccccgatgcttacgaaaaagcgctggaggaaaccggcctcaagcccatttcccgtccggagctggatgtggagcagatcgaaaagggcaaggatctaatcttcaccgccatcgtgtatgaatatcccgaggtgcaactgggcgattacaaatccatccacgcggaaaaagtcgtggacgaagtgacggacgacgatgtgaacgccgaaatcgagcgcgagcgcgaccgcatcgcccgctatgtggatgtgaccgaccggcctgtaaagctggacgacgaggtgaacatcgattataagggcttctgcgaaggtgagcagttcgaaggcggcaccgccgaggggcagacgctggtgatcggttccggtcacttcattccgggctttgaagaccagctagtgggcaagaacattggcgacgaagtggaagtgaacgtgaccttccccgaggaataccacgccgaaaacctcaagggcaagcccgccaccttccaggtgaagatcaattccatccgcgtgaaggaattgcccgcgctggacgatgagttcgccaaggatgtttccgattgcgatacgttggaagaatacaaggcttccgtgcgcaagcgcctggaagaggccgccgaaaaccgcgcggagcgcgcctttgaaaacgaagtgattgaaaagctcaccgaaatggcggaagtggaaatccccgagccgatggtggaagacgagatcacttccatgctgcgcgatatggagcagcgcatgatgtatcagggtatgcgcctggaagacttcctcaagtacactgggcaaacccttgagcagatgcgcgaaatgtatcgcgagcaggcgcaggagcgcgtgcacacgcgtctggcgctggaggcgctcaaaaaggcggaaggcatcgaggccacggaggcggatgtcgacgcggaactgcaaatggtggcggacgcgcagaataagccgctcgacgagatcaaggaaaagctttccgacgatgtaaaggaatactacaagctggtggccgaaatgaacaagacgctcgacgcgctcaagggctacgcggtagcttctgcgccggagagcgaagcgccggctgaagaggcggaagaatccgccaagcccgctggtgaataactggtttcatcatcgccccggcgcataagtccgccggggcggcacataatgaagagtgccccgtcatgggcatgcgcgcataaaggaggtgcagtcatgcacaacaatcttgtacccattgtggtggagcaaaccaaccgcggcgagcgttcctacgatattttttcccgcctgctcaaagatcgcattatcttcctcagcggcgaaatcgatagcgtcaccgccaatctgaccattgcgcagatgctgttcttggaaatggaaaatcccgacgcggatatcatgctctatatcaacagcccgggcggcgaaatcaccgccggtatggcgatttacgatacgatgcgctatctgaagtgcgaagtttccacgatttgcgtgggcatggcggcctcgatggcggcagtgttgctttcttcgggcgcgaagggcaagcgcaaagcgctgcccaacgctgaagtgatgattcaccagcctttgggtggcacgcagggtcaggcgacggatattgccatccatgccgagcgcatcctcaagatgaagcaaaagctcaaccagattttggcggaaaatacgggcaagccgctcagtgagatcgatcgcgatgtggaacgcgatcacttcctcacagcggacgaggcaaaggaatacggattgatagacgagatcatcgcgccaaggagatagaaatgggatataaagacgattatcgcaattcccgccatgtgcagtgctcattctgcggcaagacggagctgcaggtcagcaaaatggtcactggcccgggcgtgaacatctgcaatgagtgcatcgcgctttgccagggcatgattgcggacgatatgccgccagccgctggcgacgtgccggagtttgtgctgcgcacgccgcgcgaaatctgcgatgtgctcgatcagtacgtgatcggtcaggaagccgccaagcgcgcgctttccgtggcggtatacaaccactataagcgcattcattaccaggcgcagggcaggaagaacgaggtggaattgcaaaagtccaatatcgtgatgctgggccccacgggctgcggcaaaacgtacctcgcgcaaactttggctaagattttgaacgttccctttgccattggcgatgccaccaacctcacggaggccgggtatgtgggcgaagacgtcgaaaatgtgctgctccgcctgattcaaaacgcggattacgatgtggaactcgcccagcgcggcatcgtgtacatcgatgaaatcgacaaaatcgcccgcaagagcgagaatgtctccatcacgcgcgatgtgagcggcgaaggcgtgcagcaggcgctgctcaagatcctggaaggcaccatcgccagcgtgccgccgcagggcgggcgcaagcatccgcaccaggatttcatccagatcgataccacgaacattctgttcatctgcggcggcgcgttcgatgggattgaaaagatcatcgaaaaccgcgtaggcaaaaagaccatgggcttcggtgcggaaattcacagcgaaaaggaccgctccatggatgatatgcttcagcaggtgaagccggaagatttgctgaaatatggcttgattccggaatttgtcggccgtctgccgctgatcgttccgctcaagcagctcgataaagaggcgctggtgcgcatcctcaccgagccgcgcaacgctttggcccgccagtatcgcgagcttttgcgcatggacgatgtgtcgctggaattcgagccaggcgctctcaacgccattgctgaaatcgcgctggaacgcaagagcggcgcgcgcggcctgcgggcgattgtcgaaaatgtgttgctggacacgatgttcgatttgccgtccatgcccaacatcgataagtgcgtgatcaccgaggattccgtgcgcaagggcaagcccccgcttttgctggaaagcggccgcaagcgcctggcgtaaaggcagtaaggataaaatctgtcgcagtatttttgcggattttcaaactggacggcataagtccggggaactttgggcgccctcagaccatttgggtctgagggcgctctgatcgttgacaaacctgcggtttgagggcggaaattcccggtcacttgcgaaccttcagatttgcaagtggttgggcagcttgtccatcgccgtggggcttcgctgcgccacctcctttttttgcgaaaagaccgctgccatcgttaggcggttatggttgtcttatgcacttcctgcgcgagcgcgctcggcacaagcaggcacagcgccagggctgcaatcaggatttttttcacagagcactcctttccgccgcggtgtcaatccgcgcccggctgtagcgaaacaggcagggcggcgagcggaaacgcttcgccggtgatggcgttgacgtaattgtattccaggaggatatcgtcgctttcctccatcgtggcaaattcccacgcggggatgagcgtcacatccagcgaattgggatcgctcctttgcatcacataggtcagccggatgtgtcgcacgtacagcggctgatagcccagcagcgaattttcccaggcctccgccatggcggcggccgcctgcgcataggggatgagcggctgttcttctcccgcctgcagaatggtgacgggcaaattgaaattcacgctgtccacgccctggggcgtgacggtcatatcggaagccgggcggctccaaatgccattggcgctcaggctggcggcaatgggcaggccctgcgcgctctgctcaaaggcgatgacataggcaatgtccgtatcgtcgccgaaatccgtgagctcgggcgcgtcaaatttcttgcccatttccgcataagccgcgcgggtctcctccacggccgcgcgataccgctcgccattcacgctgtagaaataccgcaggctgtattcgccctccagtcccatggcctgcaaaagcgccgttccctgcgccatggcctgcccgggcgtggcaaaagaaaggaattcccggctttcctccagcacttctccgtgcccggcgtccagaaacggggcatagcgggaatggctggtggacagcgcgattccccaattgcccgtgacgtacaggcgcttgccgttgctgtaggaataggaatattgccaatcgggactgttgcgcgctccgccttcaaatttcagatcaaaggacgcgccgtaatggttcgccaggcccgtgagaaacgcgtcatgctgggcagcgggatcgaagagcctggcatgcaacgcgctcgcccctgcgggagcgggctccaccgaagcgtcgaattccaccgtaccaaccgtccacacgaacctctctgtttccgccagcgcagcgccacacaaaaacgcacacagcgcaatcagagcgcaaatccatcttttcattatttccctccttctgtaatggtaatattggtatatgctgctttatagacgttttttggcggaaaatggttcctccctgtgcgcttgattccatgggtcgaagggccggaacaagtcgatgccccctttttgtgcgccgacttgtggcgctgtacgcaaaatgtggcctgtttcaagtattttggcataaatcaaggggtgaatcatacgcgttgcaaggtgtgggagaatttcacgtttacacgcggcggcgcttgcgatatactttttgccagggcagggaatgcggcaccggccgggcgcggaacctgcaaagcagaaagagaagaaatggtaaggaggactcgcgatgaagaagaggacggcggcgttggcgatggttttgctgctggcgcttgtgccaggcgcgctggcggcggagctcaacgatgtgggcgtttatcccattacgcaggaaacagaagtgcttacgatactgatgcagcaggatgttctggtggaggattacgataccaatgcgtttacgttgtggattgaggaatcgtgcggcgtggatttgcaatttgaactgcttcccgcgggaaacgatggcaccgataagctcgcgttgatgctttcgtctggccaggaactgccggatgtgatcaacatgcaaatgagtgtcttgcaggattacatctatggaacggcggggatttttatcgacctgaccgactattacgaagattatgcgtattatttcaaccaacgggcggcgcaatatccggatattgattttctggggcccattaccgcggcggatggtaagatttattcccttccgcgctattacaacgaaaccatcggccttaccagcaagcgcttgtggatgaacatggaattcctggaagcgctggatctgaaagtgccgactaccacggaggaactgtatcaggtgctcaaagcgtttcaggaacgcgacccgaatggcaatggggtgaacgatgaaattccgcttttgggcagctcatccgcggaactcatgggctacttgatgaatgcgtttatctacaccaatccttcgaacaattactatacgctcaaagatggcgtgatcggcgtgagctatacggaggacgcgttccgcgagggcctgcgctacatgaaccggttgtgtgaagaaggtttgctttcgccgctcacgttctcgcagagctttgaccagtacaagcagactgtcaccggcgatggtgaaaccgctacggttggctgctttgtgagcttttccacctctctgagcatcaacaactatgccacaagtcccctgacgccgcaatataaggcgattgccccgctctctgggccggaaggcgtgcgctttaccgaatatacgcccacgatcgcccagccgcagtggcacgtgaccgcgtattgtgaaaacccggagctggctttccgcgtgggcgattttctgatgaacgaagaggcgtttttgcgcgcgcgcattggcgaacccggcgtgcactgggaatatgccgagcctggcatgccatccttctttgaagggcgcgacgcaaagttcacgttcgtgagcatttggaatgaaacgcagaattccatgtggcggctcaatatccccaccatttcggtggacgacctggatttgcgctattttgatggcgaccccacgaacgccacgtatacatgcgccgtatcctggcccgaatatcaggcgtgcattccgcccgagggagaatacgcgccggccttgatcttcacgccggaagaggtggatgccatcagtgagattcaatccacgctgagcacctatgtgggcgagtgcattgcgaggtttgtgacaggggatatggacatcgaaaacgattgggagagcttccagaacgaattggacgcgataggcctggatctcttcctggagaccagccagacggcgtatgaccgcatgatgggttaatggtttgcctgtgcgctaggcggccttattgaccgcctagcgcgcgcagttcgctgggggataagccataggcgcgtttgaaggctttgtagaaggtattgtgcgaagcaaaaccgcaggagagccaaatgtcgttaaccggctttgtggtgtgcaaaagcaaatcgcgggcggtttccaggcggtgcgtttgcagcaaatcgctcacggtgcgacctgtttgttccttcacgaaattgctcaggtatttttcggaaatgccaatggcttgggccagcgtcgcgtggtagagcccggcatcggaaaaatgcgcgtcgatgtaagccagaatttgggcgagcaactgttcgttgtggctgcgcttgccttcgttgagcgcctggcatagctggctggcggcctggatgagcgcttcgatgttttcctctggcgcaaggccggaatggtacaggctcaggggaaacgaaaggttttgctgctgcatggccatgagaatgaccaggcgcacggcatagtaaatttgttccatgccgacattcggcccgccagaagcgcgaaaagagcgctggatgaattggcaggcttcgtcctctttgccggcgagcagcatgtgcagcaattcggtttgcccggggatggtgagcgatagattggtggcttcgctcttgggaatgatgcgcaccagggagggcgcggcatcctgctgcgcataacttgccagctttgcggcggcaaaggcacaactgatttcttccgggcgcaggcacaaggggctgatgaaaccgtggatttccgcgccgaaaagcgtgcccatttcagaaaacaagcgctccatttggttggcgaacgcctcgcgttcggtttcactttcgcaggcgctgaggatgcacagagattcggcatcgagaagctgaacaatgcaatcgcggggcaaaagccggcgcatgtagtttgtcagcagcgggcccaaagtggcgtttggctgggcgttgttggcttgaaacagggtgtagcacaaggtgctttgttggggaatcccttcgatttggagatccgtgctccagccggaaatgaggcgttcgatttgccggttttggcgttcatcgtgcgcggcttgcgtcacggcatccaggcggttggccttttccaagatggcgcccatggactgtacgatgagcgcataggcatttctgtctcggtcgagcgccgcgccggattcgcgcagttccagcagaattttgcgcacgggccgcgtaacgcgcgcggcggaaaccatggaggccgctacgcccagcgcaagccccaccaacaaatagcgcgcgagaacttttagcacgggctgagcatattcggcaaagacggcgctgggaacggcgatgcgtagggaaagcgtttttcccgcgatggaaaaccaagtgtaacgcatatcgccgatggcgatggggttgttttccggaacgcgcagaagcgcgaggtcgccggaaaggtgattcccggcggaatccaggatttcgaagcgttcggagttttgcgcggcggcgggaaaaaggatggattctatttgctcgcaattgagtagaaccactacgcagccatagggtttcacaggatttgatctgctgaaaatcggaaaatagtagggcaatacacggcatccctgtggcgtgatggagggcaaatgtagctcggtttccgtgagcatggcgggctgcgcgtattgcggctcttctggcgagcgcgtgagcatatgcagcaaggcttcgttgccatagtaatcggcgaaggacgcgcgggaatcgaacacaaaccgcgcggtgagaacgatgtcgttgtgctcgtacgatacgaggatgtcctcaatcaagctgtttgcgccgcggatggaggctaggaaatcccgcgcgtcgatcatggcgatgtaatcgcgcggttctacttccgcgcggatcagactgacgcggtcaaatcctttttggctggataaatacaggaacgcatcctgtatggtttgaatttggcgctccaaatgtgcgagtgcagcggtggcgttcccctttcgtgcatccagccgcgcgctttgcaccgcatcgcgcatggtgtgcgccatgggccaaaaagcaaaagcgctcagcgccacgaccaaaagatacgtggccagggtgttcagaaagtgccgacgggcggcaggcagttgaaaaaggagcagggaacgtttgtgcagcattgccaacgcctccaaacaaatggaatcgtcaattgttctataaggttcattataagaaatcaaaatctgcacgtcaagtggaattttacgcgataccttgacgagcgtaggattctcggcattttgccgcagaacggggcgagacgctgaaatgcgcttcgcgaggaacatttgcgcgcgaagggaacgcgcgcaggaaatgaggagggcctgatgaatatcactgcaagccgcgcactagcgcgcagacaggcgtggaaacgcgccagacgtcattggcagctatatttgtttttgctgttgcccgtggcctatttgattctgttcagctatgtgcccatggtaggcgcgcagatcgcatttcgcgattatagtccagttcgcggcatctggggcagcgcttgggcggggctgaaatattttgaaaaattcatagattcctatcaattcgagcgggtgctgaccaatacgctgcgcgtgtccctctattccattttggcgggattcccggttcccttggcgctggcggttatgctcaattgcgtgcgcagcgtacgctggaaaaaagtgtctcagaacattttgtatttgccgcactttatttccactgtggtgatggtgggtatgctattgcagatgatcaatcccgtgacgggactctatgcgcatatccattcgctgctctatggctcgttgccttcggatttgatggccaatccctccgcgtttgcacatttgtatgtatggtctggaatttggcaacacatgggctgggatagcgtgatatacttggcggcgctcacagcggtggatccagagctgcacgaggcggcctgcatcgatggcgccagccggctggggcgcgtttggcacgtggatttgccgggcatattgcccactgtggtgattctgctcattatgcgctgcggtagtgtgatgagcgtgggatttgaaaaggtgtatctgatgcaaacggatttgaacttgcgcgcgagtgagttgatttccacttacgtttataaggtcggtctcaccagcgtgggcacgggaacgcagttttcctatgccacagcgattggcttgttcaattctgtcatcaatctgatcattcttgcgctggtgaacgccatatcccggcgattgagcgcaacgagtttgtggtaaggggggagcggcatggcaaaccgaattcaggatactgctggcgatcgtatgttttatcgcgtcaacgcgattttgcttatgcttctcacgctttcggtattatacccgattatatatgtgctggcgaattccttttcttcaccggcggcggtttccagcggaaaggtttatctttggcccctggatcccagcgtggaaggctatagacgcgtgctggaaaaccccaacattttgagtggttttttgaacagcgttttttacaccgtggtgggcacggcgatcaacttggcgatgaccatgattgcagcgtatcccatggccaggaaagatcttccgttgcgctcgtttttttccgtgctattcgcgtttaccatgctatttggcgggggaatgattcccaattacattttgatcatgaaactgggcatgctcaacacgcggtgggcgttgcttctgccaggcgcgctttcggtgtacaatatgattatcgcgcgcacggccatgcagagcttgccggatgaactgctggaagccgcatatattgatggctgtagcgacgcccggtattttgtgcggattgttttgccgctctctggagcgaccatagcggtgctggcgctgtattatgccgtaggccactggaattcttacttttccgcttttatgtatttgagcgatcgctcaaaatatccgctgcaaattgtgctgcgcgaaatcctcattatggggcagattgcggaatcagatatcacagatttggattccgcggagcgcatacaagggctgtcgcagcttttgaaatacgcgctgatcgtcatttcgtcggcaccgatgatgctgatttatccgtttgtgcagaaatactttgtgaaaggcgttatgattggttcgctcaagggttaaggagggcatttgcatgcaatgggattcggcgtttccgggtggaaatggaaaattgttgcgcgcgacgcgcgagagctggggatgggatatagcgtttttggcggaaagcaaagcgcgcgagccgcagccgctgtggttttcttttcgcttgcggggaatcgacggcggaaaattgcggcttcgcctggcaaacagcgcgctatgtttgggcggcttagaggaatgggaacgcaaccgaccggtgtatcgctttcccggcggaacgtggcagcgggcggcctgcggtcaaaaccattggagtcccgggcacacggtggaaacttggtttgaaattttggagccagcggaagaagtggaatttgctttctgctatccctatcaagaggctacgctgcaagatacgttgagcgcttgcccggcattccagcaggaaaccattgggtggacgagccagggaaggcccatttggcgggtgtttaatgcggtgggcgaggagagccgctcccgcccgggcatttatgtgcttggcaggcaacacagcggcgaggttacaggcaattgggaaatggatggcatgttgcgctatctttccagcgcggagggcgcggacgcgctggaacgctttgcctggtggtttgtaccttttgtggataccgacggcgtagcggaaggatattatggcaaagatcaggcgcacaatgatttgaaccgggcttggcacaggaattttcccaggcgcatagagcttagagccgtgcagcaggacatgcgcgtttggcagcaaatgacacaagcgcgcttgatgctcgatatgcacgcgccggggcatggcgaacgggaatcgtattttccagtcggcgcggatacgccggatgcgtttcgccaggaattgcgcgcgctttgcggcgcgctgaacgtgcacttgcgcgcttgcggcttgcaggaagcgatatttttggagaagaaaccgggaaataacaccagcgcacaggcgggcatgactagcgcggaatatgcccatgcctgcaaggtgaatggcagcacgtttgaatgtacctaccagggcgaacgaacaggccgtacgtatgagattcaggattaccgccgcataggcgcgtgtatggtaaaagccatttgcgatgcgattctctgaagggggaatcggaggaaccggcaaggacgggatagaaccgtttttgccggtctttttttgataggcgccaatttgtgcgataaaatgtttataaaaatgtgcatatattacgaaaaatatttgtatcagaaagcttgtattgacgaatatgcgcaggcttgatatactataagtaacgaatgagtagggggggtttttgtgccgcaaaaacaaggggaatcttttggcggccttttggcgggcgtgctagaaaaacagggcctgtcgtatgcggaggtggcaaaagcgctcggccacaaaagcaaaacgacgctgcacagaatcctcaatgatgattgcagccccgcgatggcggagaagttttaccatgcttttttggcatccggcttgtgcgaacttggcgaagaggagcagactgcgctggatgaggcgctggaaatgtctttggtaggcagggagcaatttctggtcaatcaagcgatgtggcgcattctccgtggggagcgcgtttcccccgtcgatgtgccgttgcgcgtttcgggcgaaccgccatggccgtgcgaaaccttggaatccctgctcatggcatgctttcaagcggataatgcgcatttgttggtgatcaacgcctgtcaaacgccgctgtttccactgctggcaaagatgctcaggacgcacaggcgcgcaaaagtgtatgtggatcaccttctgttcgtggatggagacgccatccgcacggccaattctatgaacgcgctgatggaaattctgtgcgattcacgctgcaatagctgttcggtgtgttgtggggatgcgccctatgggtatggcggcctgatgcgcgatgattgggccattgtgcgcctggagcagggcggcgctgtgtgggaatggcaagtggcgctttttaccggtggcggttatgccgtcgcggggagggagaaggtagggttgtttgatttctggcgcgagatccttcgcgcgcatgcgcccaatgtgcagcccatccgccgggcgcgcgtgattggccaatcggaaaaagatttttttgccctgatggagcgcctggtggaaatggagcggagtcagtccctgtatgtcgccaagggcggggtattcatcaatctcgtaccgccggatatcttgcaaacggcttttttggaggggcacgtggaagaagcttcaccggaattgaaacgggccgcggcatatctgcacaaaatgcaaactcttcgctatgagaaccggcgcaggcattaccggagcacctattatatttgtacgcacgcggaactgtgcgaatttgcgcgcacaggcatgcactacatttcttttccctttttgcggccttatacgatggaagagcgcaggcgcatttttcaatccatcctcaatgaaatgcaggaaaacccatattttgattttcgccttcttcgcaatggcggccagcaaagcaagctgcaaatgtgctttttggaaggcggcagcgtgctctttatagcgccatgccatgcgggtgcgtgcgaagagcgccaatatgttgaagccatgttcttgcaaaaggaattcaacgcgcaattgcacaattttttccgccgggaattgctgggcaggcaatcgatgccccgggaagaaacgcgcaaattgctggcgcagctcatcaaagaaatggcggatggccagtaagccggcttttcgagccgcgcacgggccatccgctatgattttttattcaaagagcatgtgctccacaaaagcgtcttgaaaatcctcgagctcgctgagttcaatatagtgggcgcgcgccgcaagggcctgcgcgcgttcccgcgcgccctgcgaaagcaacatttccaccgcgcccatgccggcagcgttgccaatgggcacgattttgccgcgcagcagttctggcaacagcccgatggctagcgcgctctgcgggtcgatggcgctgccaaatccgccggccaggtagcactcgtcgatctccgtaacgcccatttcgcgcatgagcaactcaatgcccgcggcaatggcgcccttggcgagctgcacttcgcgtacatcctgctgcgtgagataaacgccgggcgccaggtgcgcgtccgcttccaggcggcccgtttcgtcgatgatttccgcggataccaactccgcgatagcgtcgatcaggccgctgccgcacagtccgcgcggcgcgccgtcgcccacggtggcaatctgccaatttccgtcgggcaaacgcttggcgcggcggatggcgcccggcgctccgcccatgccgcatgtgatatgcgcgccttcgaacgcgggcccggccgctgccgcgcacgcgccgatgttcccttggtgcgcgagcagcatttcgccgttggtgcccacatcgagcaaaaggcgcgtggtgtttccctgatccaggccggcaaatagcgcggcggaaacggcgtccgcccccacaaagccagagatcagcggccccacataagcgccgttttgttcgatggccgcgcgatacgcgggcgtaaagggcgcgcgccccagcccgtccactgggaggccgcacaacaattgcatcattgcggggttgcccaccaccgtccaggcgcacgcgtcccccgccatttcgcttagcgcgttgcggatgggcgtagcgagatcttcgccgcgcatggcggattggatgcggctgataacgtccgccccaaagcgccgttgcgggttcatggcggatttggtgcccagaatttttcccgtagccaggtctacttggtaaaccgccagcgtggtcgtgcccacatcgatggcgcaacccatgccgctgcggcccggatcgacggccatgcttttttcgcgcgcgcgcagcagcacttcgccgctgtcgcgctcaaattccacttccacctcgcccagggcgtgcgcctggcaagccagacgcacgccttcctgaatttcctgctcgctgagcgcggccttttccgcctccgtgggctgggaaagcgcgccgcgcgcttttacgcggcattttccgcaccggccctttccgccgcaaggcgcgctgaggcccggcaacaacgcggtgagcaattcgccatttccctgtatgcgcatatcagcaccatccatattttatctttattgcggacgtttgtggccattatagcacatttttccgcccgtgcatagactaaaagtgtggcggcggccagtttttcgccgccgattggaatggagtttgagggaggaacaccctatggatatacaggcaaaggtttgcgcgctgtttgccgatttttctcgtttgccatcggaaaaggcgctgccctatatcgcgtggttggatttggcggaaagccgcttgacgccgggcgcgttgcagcggcagaagtttgtttaccatattgcgcccgttgaccggcgcgaaacgctggattcggcgcgctttgcgctgcgtttgtgccgccaaatttcctttgcggattgccaaaatcttcgcgcgagcgcggatggcagggatttgccaccggacgcaatccatccgttggcggagggcggctttgtggtggattggccgctgagcgcggtgcaagccgtgctcagcgtgcaatttgaattggcagaggcgcgacccattggcagggcggaggcctttttcccgggccgaagcgcgcggcttgccttgagcgggccagtgtgcggcgatgatgcggcgggccagtatgtgtgggaaatcgctttgccatttgcggcaagcgcagatgtgcgattgggcgagccggccatttggtgtctgggcgctcccagggttgagcgggaagcggacgggtgtttcaccatccgtcagcggttgtttttggatttgcccgcgaatcacgcggcgcacttgcaaaggggtaagccgcagattaaccaatccataacttgacaatgggaggaatgtgtggtagtatcacgttagcacactaaagtatcaatcggaggaaaaaaccatgaaaagactgttcgttctgatgctggcccttatgctgctcgtgcccgccgcgctggcggaagatgccgcggaaagcgcggatacgagcctggactacatcctggaaaaaggcactctcattttgggcctggatgctagcttcccgccgatgggcttcacgaacgatgatggcgaagtggtgggctttgatatcgaccttgcgcgcgaagtttgcaaccgcctgggcgtggaactgattgcgcagccgatcgattgggccgccaaggatatggagctaaacaataaaaacatcgattgcatctggaacggcatgtcgatcaccgatgaacgcatcgccaccatgaatatgaccccggcctacctgaacaacgaaatcgtgatggtggtgaagggcgataccttccaaaccaaggcggatttcgcgggcgcgaccatcggcgtgcagggcggcagctatgcggaagaagtgctggcggcggacgaggcgctgggcggcatcgtgggcgaaacgctggtcttcgacgagtacctcaccgcgctgatggatctgcaggcgggcaacctggatggcgtgctgatcgacttggtggtggccaattaccgcctggaaggtctggaggacgattcgctggttgtggtgcgcggcctgggcgacgatatggaagagaacatctatatggatctgtacggcatcggcttccgcaagggggacgacgcgctttccgaggcggtgtggaacgcgctgctggagatgaaggaagacggcacccttgccgaaatcagcaccaattggttcggctcggatatcacggtcgtagaggccgccgcggaagccgagactgaggcggaagcggaagaataggcgattgggaaaggcgccgggccgccgcgcatatgcggcggcccggttgtttggcataagaagatggcaattaagtattttaacgatccggagcgcatgggcaagctgctggaaatcttgctggagggcgcgctgacctctgtgcagatcttcgcgctcacgctgctgttttccattcctctcggcatgctggtggcggtggggcgcatgtccaagcgctggtacatcgcaaagcccatttcgctgtacatttatatcatgcgcggcacgccgctgatgctgcaggtgatgttcatctattttctcctgccgcacattctgcccttccgcatcgaccggttctgggcggcgattttggcgttcgtgatcaattacgcggcgtatttcgcggagatcttccggggcggcatcagttccatccctgtgggccagcgtgaagcggcgcagacgctggggctgagccgcgcgcaaacgttcttttccgtgctgcttccgcaaacggctaagcgcgtgctcttgcccgtcaccaacgaagtgatcaccttggtgaaggatacggcgctggcgagcaccattgccgtggccgatttgatgagccaggccgagcggcaggtttccaactccagctctattgagccgtatattgtcgccatgctgatctatctcgtgatcaacggtgtggtggagcaattgtgcaagcttgcggagcgcaagttcaactattatcagtgaggaatggacgtatggctatgctaactgcgaagggaatccacaagcgctttggcgctgccgaagtgctcaggggcgtgtcgctcagcatggaaaagggcgaggtggtggcgatcatcggcccgtccggctcgggtaagagcacatttttgcgctgtctgaaccggctggaaaccgtggatgcgggcgaaattcagctcgacggggaatggatctgccgcgaagaaaacggccgggcaaagtatgctccggagcgcaagctccagcagcttaccatgcgcatgggcatggtgtaccaatcgttcaatctgtttccccatctttccgtgctgcgcaatctcactttggcgcccatgaaagtgcgccacgtgccgcggcagcaggccgaggcgcgcgccatggagcttttgcaacgggtgggccttggcgataaagcggcgcagtatccctatcagctctccggtggacaggcccagcgcgtggccattgcgcgggcgctgtgcatggagccggaaatgctctgtttcgatgagccgactagcgcgctcgatccgcaactcacgcaggaagtgctcgccgtgatgcgcgatttggcggaagaacgcatgaccatgctggtcgtcacgcacgaaatggggtttgccaagagcgtatcgaaccgggtgctgtttatggaaaacggcgtggtggcggaagaaggcgcgccggaagcggtgtttgccagcgaacgcgtgcagcgctttgccggcggtgtgagcgcttagctgtgggagcgggcaaaggaggagatgcgttatgcggccgatccaccggcacgtgcatttggattttcacaatctgccaggcatttatgatttttgccgcgagtgggatgcggctgtattcgcccagcaattgcaggacgcaaatgtggatttcgtcaatttttgcgcgcagtgcaatttgggctttgcgtattatgccacgaaagtgggcattccctatccgggcatgaagggcgatatgcttggcgacgtgctgcgcgaatgccatgcgcgcggcattggcgtcgccgcgtatatcaatgtagggttgatgcacgagcacgcgtttctccatccggaatggtgccgcttggataagaacggagccattttgcgcggcgaccgcacgggcaactttttccgtaccatgtgttacaattcgccgggttatcaccgccatctgctggatacgatccgggaaatctgcgcctacgatatcgatggcctgttttgcgattgcatgcatttttttccttgccattgcgcgcagtgtacgcaggatatgctggcgcgcggcatcgatattgaagatgagaacgcggtagaagcgttttcgcgcgaggtaatgctgcgtgtggcgcgggaaattcagcagattgccgggacggagcggcatttgtattttaatggcatgcccgtatacgcgtaccgtgggttggatacgcacatcgagctggaatgcctgcccagcggcggctggggctatgattttctctggtcatccgccgcttatgcgcgcagcctgcaaaggactgttttgtatgtgacgggccgtttccaagcgggttggggcgattttgggggctataaaggcaaggcttcgttggaaaacgatgtgttcgacgcgctgtgcaacaaccttctcccgtcggtgggcgatcatatgcaccccgcgaagatgctatcgcgcgacctttatcgggacattggcgatatctttgcccgtgtgcgggcgtatgaatcctatacgcggggcgcgcgctttttggcggaggtcggcgttttgaccgatgacgatggttttcctggcgatgcttataagggccttgcgcgcatgctggctgagctcaaacaggggtttgatatcgtgcatacttccatggagatttcccgctttgccctggtgattttgccggatggcctggctgtggacgaggcgctcgcgcaaaagctgcgggcatatctttcccagggtggaaaaattttgagcacgggcacgggcgggcttgccagcgatggcggcggctttgccctgccagaatacgcggcggattgcgaggggctggatccatcgaacgattcttattttgcttttgagaatcttccggaaggaacggcggatatgccctggtccatgtatgcgccgggcattttggtgcgggcgcgggcgggtgcgcaggtgtatgcgcggcacattcagccctatttcagtcgccactgggatggaaggcacggctatttttatacgccgccggaacgagagagcggctttgcagccgctgtgctgtgtggaaacgtggcgcacatcagcttcgacatttttggcgcgtatttccgcagcgctttgcgcgagcacaagcgcctggtcgctcaactgctggatgcgttgctgccagagccgcttattcggccgttggcggggattccatctaaggcgcgcgttacggccacggcgaccgagcggtatacgcttttgcatgtgaaaatcaccagcccagagccgcgcgggcggatggaaattgtggaagagcacgatgtgttgcctgcgggcgcgcgcgtgggcgtgcgaggccgctatccaaaggtgtgccgcgtgccggatggcgcgccggtgcgttcctggcaggaaggcaaatatactgtgttggaattgccgcaaatcgtgggttatgatatgtttatgctggaaggaaatgaggcgtgaccatagggcatgcggcaaaaaaagcggggccagcgttcgctggttcccgcttttttgccggcctggtttgttgcggcaccctttttcaactgccgcttaaaatccgtccgccgcaacgatgcacactggcagcgggaaaaagcggcgggcgcaatctggcagggcggaaacatccacaaagggcgtaggggccaagagcagattttgcgcctccagccgcgaaagcaggatgtctggggtatcctgcgtgatttcgcaggcgatttcgccgcgcgaggcacagataagcagggttttcccttcttccgccagccccagcgccaggcggccatccggcaaatcttcttcaaagccgccaccgcatggcacacgctgggctttgacacctccaggcgccgagcgacatccacggagcgcaccatgcccgttttcttatggagaacaaggatggtttcccgatagtcctccccggacgcatgaagtttctgttgcgtttctctctcaaattatccggcaatgctccagccctctgcctgctcgcggattgtaatgaaacggcgataaagtccttcctgctgaacaagctgctgatgtgttcctttctgaacaacttgacctttatccaccactaaaatctggtcagcgtgttcaatcgttgccagacggtgggcgataacgataaccgtttttccaatggtcaattcactgattgcctgctggatcagatgctcattttcggggtcaatacttgctgttgcctcatcaagaatgacaatgttggcatttttcaaaatggcgcgggcaatagaaatgcgttgtttttctccgccggacagcgtagaaccaccctcgccgatcaccgtttcatatccatcgggaagagccataatgaagtcgtggcaccgagcctttttcgcagcttctataatttcttcctgcgttgcacttggattgccgaaacggatgttgttttcaatggtatcgtggaacaaatagaccttttgaaagaccatcgagatattgcagagcaaactgtcacaggtcatgtttcgcacatcctcaccgcctactgtgacctcgccgctgtccacatcatagaaacgggcaatcagattgcaaatcgtggtcttgccgctgccagatggccctacaatggccgtagtgctgccctgggggatggaaaagctgatattccgcaaaacaggaactttatcgtaggagaatgtcacatcacggaaagcaatgtctgtgttctgcaaagaaatatctttcccgtctttgtctataatgtcggcgtgttcaatgccgtccagtttatccagcgtagcatcaataacctccaatacatgggcggcgttgttcatggcttccacacttccaaagatcataaaggagaacatatccagcatgagcatggtaggaagttccatactgccgttataggtcagcagagcggccacagctacaatggcaatggaggcagctttcagagaaaacaggtgcaggcagttgaagggcatatattccacttcaattttgatgttgattttcttgctgtcgttgtatgctttgcggataccggcaatagacacgccttcctgcttaaaggctttcaccacctgcatccctcgcagatactcaatggaactttccaccatatcatcctgcgccttttgatggataggcgcgttttggtggctgcgtgcctccagcagatggaggaatagggcagacagaaggacgccagccagagcaattcctcccgccatagggcagtaaaatacaaggaacattattaggacgataacggtgatgtatccattcacaacggtgttgaccatattcatggcgtacatctccataaacgagaggtcagtcgttgcggctgcggatagttcgcccatattgttcttactgaaaaagcccagcgacacccgtttcaaaatatctcccagccgtattctttcgtcagcggttgcttcataaccgacactttcctgcgtgatagctcggagatatgagaacaggtatcgacccaatacagctaaaatcatggcccccagcatgatccagatgtcccggccctccaatggtttaacgccattgaagtcatccagaacagcacttagtccctttgcagccagcataataggaattgcggtaaaaatgctatgaatgaaagcgtagataaacccgatgtaaatacgccgtttatattttcctgtccattggatcagtcgatttacaatccgaaacatatcagttacctcctttcccggaaccggcagaccagttctgcgctccgatatgcgcctcccacatatcccgatagagagcgtcaccagctaaaagctgctgatgagtgcccgtattctcaacctgcccattttgcaggacaataatctgatcggcatttttgatggtggacagacgatgtgcgatgaccagtagcgttttcccttttgtcaaagcagcgatagactgctggattttttcttcgttctcctgatcggtgaacgcggttgcctcgtccaaaatcacgatgggggcatttttcaaaatcatgcgggcaatagaaatgcgctgtttttcaccgcctgaaagccggttccctgcatccccggccatcgtgtcatagccattgtccaatttctgtataaattcatcacagcaggcggcttttgctgccgcatatacttcttcgtccgtagcatcagggtttcccagccggatattttccttgatggagcagttaaacaggaagttatcctgtgtaacaaagctgacaatatcggcaagttgggccagcggcatactgcgaatgtccacaccgccaatggtgatttttccatcgttcacatcccaaaaacgggcaatcaagcgagcgatggtggacttacctccaccggacgggccgacaagtgccgtaaactttccctccgggattttcagattgatatgggaaagcacctgtttaccgctctctttatcataagagaacgaaacatcctgaagctgaatgtctttggactgcacatccactgattttccagtatcgggcagttcttccacatggagtagcttgtctacatcgtgtacggcatactcaaccgttttcgtttcattgacataggtggtaaagttcatcagcggacctacaatccccagcgagaggatcaggcacatcacaagatcctgcggcaaaaggctgccgttccagtagagatacataccaatcggaagcgttcccaaaaaggtggacggcagcacagccgaaacaaagttcatcaccttccaggaactttgataccatttgagggtgtagtccttgaaagattgaaccgcctttgtgaatttttcataggaactggaagactgattaaacgctttgataacttcaataccctccacatactccacgatcacaccgttcacatagttgttggactccatgtaatcggcatagagcttgttaaaattcttcatcatcatagcaaaagcaatcagaacgaaaggcagcgtgaccagcatcgccagcgccatacgccagtcgatgcagaccagatagacaaagactgccacggggagcagcaggttggagatacactccgggatcatgtgggccagtggcagctcaatcgtttccactcggtctaccaatacgcttttcaacttacccacagactctccgatgactgtccccagcggcgctttcatcagccgctgggcaagggtcaaacgaatattctccaaaatggtgtatgcggatatgtgggacaggctcgttgaaataccatagagcaagaagcgtatcgcataagcgccaagtccgatccagcaccatttccaaacctctgccatcacaggtgaaccgccgataaagagcgtgataatttggtaaacactccaatagggtatcagtccggcaaccacactgatgatcgcacataagacggacagggcaatcttgccccggcactgtgaagcaaaggaaaacacaatagaaatccagcttttctgcttcatttcctttcctccttaagcaaaataatagagagtatcaatcgacttgatactctctaagtattgcagatattcatgttgtccgccactctgcccagccgggttttactccgtttagatttttatttttcgatattccagcggcgtttttccctttaccttcttgaacgcttcggaaaacttgctggtgttcgtatagccaacttttccggcaatcaccgtaatcggctcatctgtctgtgtcaaaagtgaagctgccaagtccatgcggtaatttcgcatataagtataaatggcggtgccatacacgcccttaaagcactgctttagggcagaagtagaaatatcaaacttttcagaaagttcctccatcgtgaaatggcgctccggctcatttgtcataaacgacataatagccttgatcttttccacctgagccttataaaagtaggggcgctccacacctaaaactgtagggtctactgttttgagtgtaaccaatagctctaaaatttttaccctgagatattcggtgcggatattatccggcacctggtacaactctgaaatcacatggtcgggtacagagtttccatgcatgataaaaggtcgggtctttaatgcaaattgttgctcaatctgttccaggtcaatggaaaacagggacagaagatcacctaccccctctaccgcttcgggcacagcaatcgtaaccgtaatcccgtggtaatggcttacgggaaagctgcaatggttgttttccgttgcagaactgtccagcataatatcaccggatgcaagataaagataagcaccattgctgacttcccactcgacacggccttctctgcaatggtgaattgcaaaagtgtgagtatttttttcaaacttccttgacgggcagtactccatgtgaaaatcattatacataacccctattccgggatacacctcatagtaggttgctgttccatctcccgtttcgtttttcatctgataaacggaacaggattcatcccggcagagcaaattcatattttgctgcgaaaaaaacagatcgcttctgttcaaactgggatcacctcgattcaataaaaaagtttttgagacgctgcaaccctgcggcatccagtgcatattgttcccgcaccgcaccatgctccaaatgcagaacatgagtacagcaactgacaatcaactcataatcgtgggtgataacaagagaggtctttcccatctcctgtagcgttataagttcatcggccacttctttcatgtgctgtaaatccagaccgctggtaggttcatccagcaccaaaaccttgcgctcggaaacaagggcggcggcaatcgccactcgctgcttctgaccaccggagagcgccatcgggtgccgctccttaaactgcaacaaatccaatcggtcaagaattgtatccgccttatctgaagctggctctgccatgctgatgagcatttcttcctctgtgctttccgtaaacaactggtggttgacgtcctgcatgaccatatagcacagggacagcctctgttttctattatacggtttcccatccactttcgcaatgcccttacagtgcttctcaaatccgcagaggcaccgggccaaggttgattttccggctccgttatggccgatcaccgcgataatgcccgcctgtggcagcgaaagactgtcaatatccagtgcgtcccttcgcttcgtgtaagcaaaatgaaagttctcacattcaatagaaccgctgcttacagccgaatgtgctaccaccgggaacgcccccaggtcaaaaggccgcaatcccatttctgcctgttgcgctgcggacagtttcaaggcgtccgaaggcagataatctttttcaatttttccgtttttcaaatagataacacggtctatcagctctttcaaataatagagccgatgttccgcaatgataaccgttttcccttgttgtttccaaatctggatcatccggcgcaaatcttttgtggctgacatatccagattagaagatggttcatccaggacaataatgggcggatcactggccgataccgaggcgcaggcgattttctgcttttccccaccggaaagagaaaagatatttttccccagcaggttctccatcccaaactgctccgcagtcgatttcacccgctgaatgatttcttcttcaggcaagccctgattttcacatccaaaggccagttcgctggtggagtccaccgtaaaaaactgcgtgcggggattttgaaaaacgctccccacatattttgccgtttcatagagcggaagggagctgatgttttttccatccagcaggacttcgccgctcaacttgccttcatagtaattcgggatcagcccatttaccagccgggtcaaagtcgtttttccgcaaccggattgcccacacaaaagaatgacttgcccatccgggatgattaagttaatgtttacaagcccaccggcatccgttcccccggcatatcgaaaattgatgttgcgaaatacaatcatagacgcctgcctcctaacagataaagaaaccgacccagcaaggtatcgccagcaggaagaagaaaatgtccaaaggcccaaagccgattttacatatattcgtccgtttctgcggcgctccaagccctcgcgtaagagcagccgcagacagttcttctccgattttgacaatcgaaatcatcagaggaacaatccggtattccagcatcttcatgggactgcggaaggtagtgatgccacgcatcttcatagcgtcccgaatggctgcatattcctctttgactgtggggaaaaatcggaataccaccgacatagggatcatgattttttgtggaatgtgcatcttctccatcgcagcaacaaattcactgaccgttgtcgtactcaccagataatatcccatgataaatccggggagcatgtgtgtatatatcccgactgcggctcccaggataaaattccatgtaccagtgagcagcggtaataccgttaattccaaagtaaacagaatagcgtatgtaactgcaaatctggctgcggccccccattttcttgaaaggagcaggaatacaatcgggcatgccatgaggcacgggcgaaccaagttcataaatccgcccgtgccgccggtaatcataatggtgctgacagttacagtcaaaaacagttttgtcctcggatcggtgggaataacagctttgctttcaaattttagcgttgtaaccgccgcatccatcaggcaatccctgccttctcaaagtgtttcttcaagacagccttgccaagaagcgcgcctaaaataccgccgatgaaggtgacaacaaacagaaccggatatgtccagctaggagtataggacataagggtatctacatattcctgtccatagctgcttacaagtgaagcaaagaaagtgacacgagttaagaacatccggctcacatatcccatgatccaaagggagaacacgccattgccaaggagcgtgcatttccagctttgatactttccggcccgcaaaattacatcgctcagaacgccaaagatgataccaaaaatcagaactagcacgccgctacccatgaccagattgagaaggccaaggataatgccggtcagagataccatgccgaattttttggccttcgttaagtacagcataaagggaataccgcacaggatagggcacaccaatcctaacagcgggataaagatagggatatatcccagcatcatgcccgcaaagaaaatgacaaaataaatggcggtgaaaatgcctacgttgataaggtctttggcttgtagtttgttacttcttgcttccattttctatacctccattttggttagccaaaattaactcacgccctgaaaatttgcgaaacaggatttcgcatggtttgagtttaccacaatgcaaacggtttctgctactctggatggtttgaaaatactccaagtggtttgcaaatatttgatttcacataccggcaagcaatgcaaatatatacatattttgcaattttggccggattacaccggccaaaatgcttgttgtgggataactctccccccctaagaccgtcagcttcggtggtggctgcgcgtcctacgagcactgaaattttgaaaaagcaaaagaaagggactgtgaaagaactcttgttgttctttcacagcccatccttatttcccgttcacttggcataggccggtatttttgcaatacttctttatgttcccctgccaggcgcctagaatccgtccgccgcaacgatgcacactggcagcgggaaaaagcggcgggcgcaatctggcagggcggaaacatccacaaagggcgtaggggccaagagcagattttgcgcctccagccgcgaaagcaggatgtctggggtatcctgcgtgatttcgcaggcgatttcgccgcgcgaggcacagataagcagggttttcccttcctccgccagccccagcgccagtcggccatccggcaaatctccctcaatgtgctgtttcaacttcaggtaagcgcgcaccacgcgggcgtaatccaccatccggtagcactcgttttgctcgatggaagcgttttcgcagatgcgcagcagcgggcgcaacagctccgtttggtgcggcggcaacttgacgcacacgtgtttttgtccaaaggccgtgagataggccttgatggcgggatagagcgcttctggcgaccggagccgcagttccaggatatggctgtggtctggcgaggcgatcagatagccggcaaggcttccgttcagcaggatggccagcggccgattgcgccaggtgccgcagatctgctcgaagtcttcccgcgggcgcgcaccggcgaccacgccgctttcatagatcgaaaatagcgcgtccatttgcgcgcgctggctttcgaagggagcaaaagagacgacgtccgcttccacatctttcagcgcgtggcggcagttggtggcggtaatggtcagggcgtgcatggcgccgcccggctcgtaaccataatattcgtagcgctggcgctgcccacccaatgccagcaggtcgaagccattgtcgcgggcataatcgttggtcatggccatcagctttttcatatagcccttgctgcgcgaataagggtgtacgctcaccgtgccgataaagcccatttgcagcgtttctcccagcacgcgctgggaaaagggcatcaatcccactaggccacggatgcggccgttttcccgtgccacaaagtggatgggccaatgggtacggtcttcgccataggccttggagatcagggttttgaattcgtgcggttcatgggcgtagctgaacacaaaattggcaaattccacgatctcatcgtaatccgcagccgtagcgcgctcgaacaggatatcttcggccatgcaatcgcctccctggtttggttttgccaccattatagcagatttttccgcgcagggcaatgagaacggcgtagaaaatggcgctcgtgccaggcgttacaaccactctacttcgctcttgaaggcgtcgatcacttcttgcgtccagcggcggcgcagggttgaccagccgcagccggagattttggggtcgttcgtttctggtacgccagccagagagaaacccgcgtcgatgacgatgctctgtccgctcacgctctcgctgccggcgaagaaggccacgcatttggcgatgtccagcggccggccagagcggcccagggggcaattgttcatggcggccagctcttcaaaggtcagcccgccgcgcgtgccgcccggctcgatggcgttcacgcggatgccgtcgctcgcaagttgcgcggcccatagcc

SEQ ID NO: 4487 - DNA, 12614 bp, Unknown
  16S sequences of unknown bacteria
gtgctctgcgagaacgacgtcacggcgaagaacgtcgtgaatgagctcaccgagcgtgggcttcaggcggtgaagcagccggacgacaagccgtacgggatactcaccctccccgagggggtggcgcttgtcgtgtccggcttcaatctcgccgggttcgaactgacctcgacgagattcgctctgctgtcgatgtaccagaacccgaacagctactcgcgcacgatcctctcgcacgcgaagaaggcgaagaacagccattcctcgcaggagaagatactctcctacaatgacctgacgccgggcgatttcgtcgtccacgcgaaccacggcatcggtcagtatatgggcatcgagcagctgaccgtcctcggcgtcacgaaggattatatcaagataaagtacgcgggtagcgaccttctctatctcccgaccgaccagctcgacatggtctcgaagtatataggcgcgcactcggacaccggcgccgtcaagctctcgaagatgggcggaagcgactggataaaggcgaagacgaaggcaaagctcgccgcgaaggcgatggcgaaggagctgatccgcctctacgccgagcgtcagcgccgcgaggggtacgccttcgagccggacgacgatatgcagcgcgagttcgaggcgtcgttccagtacgaggagaccgacggacagctcgagtcgataaacgacatcaagaaggacatggaatcaaaggttccgatggacagacttctctgcggggacgtcggcttcggaaagaccgaggtcgctctcagggccgcgttcaaggcggtcatgagcggcaagcaggtggctctgctcgtcccgacgacgattctcgcgatgcagcattaccagacgctgctgtcgcgtatgcgcggcttcccggtgaagtgcgacatgatctcccgcttccgcacgcaaaagcagcagcaggagacgcttagggcgctcagacgcggagatatagatatcatcgtcggaacccaccgacttgtctcgaacgatatcgtgttcaaggatctcgggctggtcatcgtcgacgaggagcagcgcttcggcgtcgctcagaaggagaagttaaagcagatagcggggaacgtcgacgtgctgaccctttccgcgacgcctatcccgcgcacgctgaacatggctatgagcggcatccgcgatatgtcggtcctcgacgaggcgcccggggacaggttcccggtccagaccttcgtcatggagtacgacgacctcatcatcaccgaggcgataaagaaggagctgcggcgcgggggtcaggtgttcttcctgcacaacacggtcgacgacatagacggcgtcgcgctcaggctctcgaacgccattccggaggcgagaatcgcggtcgcgcacggacagatggacaaggagagactgtccgacatctggcgcgggatggtcatgggagagatagacattctcgtctcgacgacgatcatcgagtcgggcgtcgacgtgccgaacgcgaacacgctgataatcgaccacgccgaccggctcgggctctcgcagctgcaccagatacgcgggcgcgtcgggcgctcgagcaggcgcgcttacgcgtatttcacctatccgccgcgcctgtcgctcagcgagatcgcgacgaagaggctgtccgcgatgcgcgagtacacggagttcggctccggcttcaagatagccctgagagacctcgagatacgcggcgcgggcaatatcctcggcgcggagcagcatggacagctcgatgctatcggttacgatctctacgtcaagatcctgaacgacgcggtactcgaggaaaagggagaggcgccgaagccgaagttcgagtcgaaggtcgacgtgaatatcgacgcgtacctgcccgagaagtatataaagtccgagtcgcagaggatggatatctacaagaagatcgcgcatatcgagtgcgccgacgacctcgacgacctggctgacgagcttcaggacaggttcggcgagataccgcgtcaggcggacacgcttatgtacgtgtcgctcgcgcgctctctggcgtcgcaggcgcggattccgacgatctcgcagaaggggcagatcatctcgatcatcccggagcggttcgacccggtgaagtgggcggaggcgtccgcgaaggcgaatatccgactgaccttccagatggcggggcgcggatgcgtcaactacaaggtgaaggactcaagaccgctgtatgacgtatgtactcttcttgaaacgtatcttgaggttctgaagcccacggaggcggagactcagaaaaagtgaaaaatcaccccggagtggatagaaacgccgtcctctccgggtttttttgttccggctatatcactgttaatatacctatattcttgataggaataccctccgcgcggagtaccgtcaatatgacagtaaggggtggatttcacaacagtagaatgtattatgttcacaatcttttatttttcggtgcataacctattgacaaatggtcgatatttatgttataataagtttacgaaaaacggatgaaaagagggataacggacgtgaatgatatctgtgacattgtaagcctcaacagggatgttgagcctctggtgatacaggcttctgccacccgcacgcggtttttcagggagatcgccgaggacaggttcagacctctgaggttcgtgcatttttcggatatacacgcggtccccgagctgtgggatcgtattgtcgattttatcaattactacagcgactatgtcgatttcgcgatacatacgggcgactactgcggtagctgtcaggaggagtatgttgatttctacgggaccggaaagccctgcgtgcggagtatatacaactgcgtcggaaatcacgataccgtcacgactcccgactggataaagaataccaaggagtcggcgcataagctgctttttgagccgtgcaactgcaaggacgagctgacttttcttgagtgcgactactcgatgacgtactacagggatttccctgagtcgaatatccgccttgtggtcctcgatatgtattttgacattgacatacagtgcgcgtggctgaggactatactgcgcgacgcccgtgagaagggactgtgcgttataacggctatgcatgagcgcacagactttgtgaatgactcgttcggcgtgactttccacacgaaaaatgattatctgtcgcttgaggggcgccgggacaggtcgccgttcgaggaaattatcgttgatttcatcgcggacgggggctgtcatatctgcaatctcgccgggcatgagcatcatgatctgttcggtatgaccgacgcgggggtgctgaatatcgccgtgcagagcggtacttgctgggacggttggtgcgacgggttgcgcgtcagggggacgaggacgtacgactgcttcaattatatggcggtcgacgtgaatatggggcttctgaagatagtccgggtcgggaataaccgcgatattttcctgcggagtcagcggtcgctgtgttatgattacctgaacaggaagatcattttcaatgattgattatccgttgctttgcggaattaaatagatttttggatgggagtggaacggcttgaacggaaaagaaaaagatgatgacagaaagaaattgccgagatcgtttgtggtgattgcgtcggtgcttatcgcgctgattgtgcttctcgccgtgttcccgttctcgaagagcatcggcggggtggattgcgctccggtcgatgtggatatgcgcatgaacgtcgaaatcgaataattaaaagctccggtttatcaccggagttttttgtatgaagtttagggtggagggggagtgcagagggggaggcgacccttttcaaagggtcgcttccccctttgcttagctaacgaagttgatatcgatatctccgccgtttgtctttgcgttcagtttgtactttgcccgttcgttttcttttgatttcggatacgcggtctggtcggtttcggtcgagatcgagaagaggagctcgtcgccgaggatggagccggagatgtcggcgtttgtcgttccgaggtcgaatttttctccgaagagacgggagaaatcgatcggggcgtttgtcgtcgtgagtgtcaggcgtttcgcggtgaggtcttcggcgcggattttggcgtcggtggtttccgcggtgatttcggtcgcggagaggttggtcagcgacaggcgtccggtcgcgtttgtgagcgttatgtcgtacgcttcgatgtcggagagggtcattgtgccgttcgcggtcgtgacggtcagctcttcttcgagtttcaggttgccgagttttacgttgccgtcggttgatatcgcggtgatttttccaccgaagctctccggaaggtagattatcatcgcgagtccggtgtaggacggggcgcgctttttgccggtcgggattttcagaccgaagaggttgagggtttcgctttcggtcgccgcttcgccgtcgcggattacgagggtgttgtcggaggtcgacattttgtatttgtaggtgtcgttctcgaggacgtcgacgatcacgctgtcggtgtcggttccggcgataactatgtcgcaggcggtgacgtctatgtcgagagagcggtttatgtcggcggagaaggtgtagcgggtctgtgagaagccggtttcggtgacgtcgggaattgagccggcggagccgctgtttatcgtgactccggcgttgttttcggactggattccggagaagtcgacgcgggtgtcgccgacgcggacgccgtttttgtcgacgacgatcaggtcggcgatgttgacctcatccggcgtgacctttacaatggacgaggcgtaatcgaccgagccggtgatcatccgcgcgacagtctttaccgcaaatttcatcgcgaagcaggcggtaaggactatggcgacgaagatgatgaccgacatgattgagagctttctgatgcctttgttgttcatttttctcctttttggcgatttcgcctttgtctgtcggcgttatcttgtgattcttccggttccgtcgccgccggtcagggtttcaacttccttcaccgtgacgaggttgaagtcgccgtttatcgtgtgcttgagggtggacgcgccgaccgcgaactcgagggcgtcgcggagcgatttgtcggtcatcagcccgtagatgagccccgcggagaaggagtcgccgccgccgacgcggtcgactatgtctgtgatttcgtagatgcggcttctgatgaattccttgccgtcgttcaggcaggcggaccagaggcagtgctcggcggatttggtctcgcggagggtgatcgcgacgagcttcacgttcgggaagtccttcattactttgtcgccgagctcgtggtagtattcgggttcgatgagccacggctcgggacggcctatgtctgtgccgagggctttctggaagtctccggctccggctatcgcgacatcggtcagtttcaggaggtcgggcatgacttcttcggcttttttgccgtatttccagagctttccgcggtagttgatgtcgcaggaggtggtgatgccgcgggctttggcggctttgagggcggctacagattcttcggcggcggattcggagacggcgggggttatgccggagatgtggaaccattcgacgccgtcaagtactttgtcccagtcgatgtcgccgggctttatgtcgcagaaagctgagtgggcgcggtcgtagactacgttcgaggggcgctggcaggcgccggactcgaggtagtagatgcccattctgccgggctttctgacgattttcgagacgtcgacgccgtattttctgagttcgcgcaggcaggcggtgccgacttcgttgtccgggaggattgtggtgtaggcggcgtccatgccgaagttcgcgagggagagggcgacatttgcctcgcctccgccgaaggttgcctctaaagtggggctctggaataagcggtcgaatccgggagctttgaggcggagcattatttcgccgaacgagaggaatttgcttttcattttggagtgtgtcctttcaggaaaatatatctgtctctattataccattaaccgcgcggaattgcaagtgaaaaacgaccgatttcctcaaatttttgagaaaatcggtgtgcctgtgtataaagcttttttggcgggggtgtgggggaggtcttttttctcgaaaaaagacctcccccactttctcattttatatcaactccgccgaatatacagacggcgttgacatagacagtcgggttgttttcattgaatgtccggttcttcgcgacgccggttccaccgaaaatcggcagggttgaggtttcgacgttcacgttgtcggggagcttgatatcaactccgccgaagagggcgagggcgtcgatcacggctccgttttcgatggtcgcgtttccgaggaggaggtccactccgccgaagacggcggtgcagaaggcgccgttgaaggtttttccgttgtagttcggggttgagccgccgaagacggcgatgtggctcgggacgtttttctgcggctttcctgccggtgacgagagattgccgcggaagattatcgcgagacctatggcgattatcacggcggggatgaggagctttgagacaatgccggggaggatgccgctctttgacagcagcacgagcgctccggcggcgagcaggacgaggtagatcggcttgaatccgtggcgtatgatcatcacgatcgcggggacgatcaggaacattgaccaccagccggggaagaacagggtgaagttccagacttcaaagatgtttcctacgtagccgatgcctatgatgacgaggaggattccgatgacgacgccggtagatttgttcgatttcattttgcgctcctttcgggcggcggtttatcaataatagaagttagcggtgcagtaggcgagcgggtagtcggcgattatttcgtcgttcgtgacgatttcgtcggcgtgctcggcgacgaggttctggagcttgacgcttgtgacggcggatgacatatcgctgaacatcgcggcgaggttttcgtctgcgtaggctttgtcttcgagttcatagcgctttacgatgtagattccggcggtcgtctcgactgtctgcacgtcgccgattttcagttccttgacggcgtttatgacgtcggtcgggaggtaggtggaggcggaggtgaagtagtagccgttcttgaagtgctgcattccgaggtcctcggtgtactgggcgacgagggcgtcgaagtcctcgccggcggcgattctcttttcgaggtctgcggcgagctcgatcttggctgccttttcctcttcgctcagctcctcggtcttgtaggctccggttgaggaatcaacctcaggattgccctcggcgtcggtgacgtacttcgcggaggtgaggacgaggatatgcttgtcgtggtagtagttctctttgtagtacgcgtcaagctcggcgtcggtgaccttcattattccgttgtcgccgaagaggtaggactggagggcggtgagcttcgcttccgcgagatagacctcacgcaggacgctgacgttcgcgccgtaggcggagagggcggagttgagagcggatttgctgcccgccgcggagatcttctggttgaccttctcgtcgacggcgttgatttcgtcctttgacagctggagtccgtagtcctcaaagagcttcaggcagacggcgttcgatttgatgttcgagatagcgagcgcctcgaggaagtcacccgcgctcaccccgtcggcgagctgtgccgtccagtactgggcgttgtcggtcgtcgttccgaagtacgcgtataggaacatcgccttgtagcggctcatccagtagcagaacatattcgacgagatgcgcacgtcgccgacaacaatggcggcgggcgactcggagccgcagcccgcgagggtcatgacgagcattacggcggcgagcgcgagacacagtatctgcgtcaggcgggagcttgttttctgtagtttcatttaattttccatgcctttcgttttttaagaaaagtccggcgttttgcggcacgcggaagcttatatattacccttatgggcgtctcctttaattatacaccatattttccgaaaagtccatagtattttgaaaatttctgccgcggaaatcgaaaaaagtgtcgggaacgcgaaaaagatcggcggatacggagaaaagattaaaattaactattgacaaacctgagaatatgctgtataatatatgctgtataaacgggtcaacagaagccgaccaacattaattgatcttcatgaagatcggaagaaaaggaagctcggttattatgtcaggaaaattatcagtcatcatcacctcggcgctgctcgcgctgtgtctcatacttaccggcacggcggtgagcgcggcggctccggtcacggcgcgcgtcacggtcgaggcgtcggacggggtctcggtcagcatttcgtccgggaactataagatcggcgagccggtcgatttttcggtcacgaccaaggggggttacctcatccgcgggatcgggataacgacagaaaagggcgcggtcgatttcagcgtcaccgggagctatcgctaccgttttatcatgccgtccgaggacgtgaacattaaaatttccgccgaggattacggtatcgtctcctacggcgagtgcgcgctcggtctctggcgtctcgccggttcgccggaagcgaaggacgcggacatcgcgatacttcgcggcggcaagccggacgaaaatccggacgcagacaccgtgaattccgcagcgtgggctgtcgcgaacgggatattcccgtcctcgccggttaatgaaaagattccggacggtactttcgacgcggacaagccgctgatacgcgaggatctgtgcagggctctggcgaacttcgccgctctgatgggttccgacacgacgaagggcgcggaggagccggagacagtcgaccgtgagctgatttcggagagcgcgcgggacggcgtctgctggacggtcggaaacggcatcgtcgacaccgagaacagcgccgccgggtatttcttcagacccgcgcagaagatcgtgagatgcgaatacgaccgcgtgatctcgaaattcatcgtcgtcaccggcatcggcgcgaagaacgacgacaagaacggcaagaacgataagaacgataagaacgaaacgaaggcggatgtcggcgacatgataatcaagtgcgcgccggcatcgaacaactgcgcgcagaaccgcgtctccgcggactgaccggcgcgaaaacagaggacaatagcatgaaaagagaagacataaacatccgcgacccgttcatcctgaccgatcgggaaaacggcgtttactacctttacggcacccgcggggacgcgaggagaaaagagctcgggtacggcttcgacgttttcgtgagccgcgaccttgaggagttctccgaaccgacggtggtattttcgccgtcggacgggttctggggaaagtatgatttctgggcgcccgaggtgcatttctacaaaggtgaatattatatgttcgccagcttcaaggcggacgggaagtgccgcgcgacgcacatcctgcgttcggacagcccgatggggccgttcgttccggtgagcgacactcccgcgacaccggcggggcaggaatgccttgacggcacgctctatgtcgaggacggaattccgtacatagtctactcgcacgagtggcttcaggtgaaggacggcgagatgtgcgcgagacggctcagcgacgacctgaccgaggcggtaggcgagccgattctgctgttccgcgcgtccggaccttcgtgggcgaaggcgataaatgacgacggcgcttatgtcaccgacggaccttttctgtacaggacacagagcggcagactgctgatgctctgggcgtcattctcgaaggacggttacgccgaggctatcgcgtactcggacaacgggaaaatcgacgggaagtggagccacgacgacagacttctgttctcgcgcgacggcgggcacgggatggtgttccgcgaccttgacgggaagctcaggttcgtgcttcacagaccgaaccgcacgccggatgagagagcggtgttctttgagctttgcgagaaagatgacagtctgtggattaagtgaaacctgaataagcgaagcggtctgtccatgctttctggacagaccgcttcttttcagtaattctcaggcttcagctcgaaatacgcctgcgggtgcgcgcagaccgggcagactgccggggcttcctttcccgtgtgtatgtgcccgcagttgcggcagatccagacccgctcgccgtcctttgtgaagacctcgccgttctccagagcggacagcagcttccggtagcgctcctcgtgcgtcttctcgatctccgccaccattgagaagagcgcggagatacgctcgaagccctcgttcttcgcgtcctcggcgaactttttgtacatctctgtccactcgtatttctcgccctcggcggcggagagcaggttttccggcgtgcgcttttcgcctccgttcaggagaccgaaccagattttcgcgtgtgcctcctcgttcttcgcggtctcctcgaagatcgcggctatctgctcgtagccgtcctctttcgcctttttcgcgtagaagtcgtagcggtttctcgcctcggattcaccggcgaaggcggtcgcgaggtcggcttcggttcttgagcctttgagttccataaaagtatcccccttgaaaattgattcacgggggatattatttaccgttttcacggttttattcagactaccggatggagcttcacccgttcgagtggcttcagtccgaacttctcggcgaaatcatacgcttttctcagtatctccgggttggcgaccgattccggctcgtgtgcgtcgcagccgagaaccacgtcgtttccgactccggcggctatcttccagaacctgtcgcacgggtagtgacggttcccggaaagcccgagcatatttatctcaagcggtatcccgagcttcttcgccgcctcgcagagacgtccgaggtgcttctcgtatattctctcgtcgccgacgtaatttatcaggtccgggtgagctatatagctgtagagcccggtcgagatgccctcgatgagctgatcgacgtatgcccgaagtatgctctcgtcctccgtcggcgtgccggaatagtgcccgtcgtactcgttgccggtgaagtgctgaccgaggatgaggtagtccgggtggtacggctttatgaggtcgatcagggcggagaagtgcttcgggtaatactcagcctcgagacccgagtatatcgtgatctttccggcgtactccttcttcatccgctcgatcgtcgtgaaatagtcctccgtctgctccgggaacatccggaaagtcgaataataatcgccggggaaaagatacggcgtgtggtcggagaagccgagaacttcgagccccctcgacagcgctttttcgatatattcgttctcgctcccggacgcgtggcggcagcgcggggtgtgcgtgtggtagtttgcggtcattttctgattcctttcgattcgatgaaatcattatacaccacgccgtcgatgatttcaagcgtaaatcgttaaaaatcagacattattccgtgacgattctgccgcagttcaggattctcagaccgtcgtcgccgatctgtccgtgatgcggcatcgtgtcgtcctctgtgaacgtgttgttccggtagaccagctcgcgcacatagttcgcggaaaggattctcggcgcggattgcgtgaacctgttgttctcgatgacgatcagcccgtggaagaattcctccgggacagaggacgtcaggtcgtgcgtgacaatcgccgcgccgcccgcgtaggcgctgtttctgaagtcgttgtcgtggatatacgcgttcatgaccggtcccgactcgtaccagtcggtcagctccgcgccgagctggattccctgattcatgttgtagaacaccgagttttcgacctcgatgtgcccggcggagctgaggaggaatccgcgcggacggttgaagccggactcacagccggtgatatggacgtcaggcgccgtcgagcggttctcgacgacaaacttcccgtcggagaccggcatcggacggtcgacagttatccgcaggctgtccggcgcggtgagcgtcgagcttatgaccttcctgaccgcgacagtctcggcggtgtcggagttcacgagcgccagctcgtcgccgcggcggaagaagtttatcccgcgctgctgcgggtgaccgaacccgacgcggatcgtcgtgccgtcgacaaactcgcggcagatgccgtagatgccgtggatgttgcacgcgtcgtccatcatgcgcacgaacttgcagttttcaagctcgattttcccgcggcagttgacgaaatgggtcgcgtcggcgttgaccgaaatcaggcgcttcgagccggggcggggctc

SEQ ID NO: 4488 - DNA, 26835 bp, Unknown
  16S sequences of unknown bacteria
tggtgggaactacagggctcgaacctgtgaccctctgcttgtaaggcagatgctctcccagctgagctaagctcccttagctcttagtgacaggtaatatattaccatactgttgacggtttgtcaataatttcaagaaaactttttcaattattttttcaaagatttgattatattatctaaatccttttttgtaaagtagtacttggcgtcacaatactgacaacccatttcaatttggtcttcttcgtcacgcagcatttccaaatcttttattcctatactgataagtgccttctttactctttctcttgaacagtcgcactgatatttaacatctgtctcatccaatatgctcggattaaaaccatccataacggtgttgattatatcatatacatcatgtccgctttcaaagaaatttgtaatgcttggaatatttttgatattgttttccacaagagaaatttcttcttctgttgctcccggcagaagctggagcaaatagccgcctgcgcatttaatactcaaatcagggtttacaagcacgcccaaagcacacacagtaggtatctgttcagaatatgcatagtacgccgtaatatcctctgcaatttcaccgctttcaagcggaatgctgcctacataaggctctttcattcctatgtccttaactacgtaaagctgtccgttcctgcctacggcgctgcctacatcaagctttccgtcccggcgcaatggtatttctacaacgttattttcaacatatcccttacaatgtccccgtccgtcacaggccactgtaataagtcctattgggccgtctgccttaattctaagggtgattgtatcagaagcgcttttaagggttgacgccataagctgtgaggcggttagcattcttcccaatgccgcacttacaaccgccgatgttttatgaatttcttccattctttttacaatatccgtagaatcaatagcacttataactacgcctcccatatcggatattgctcttaccatttttgacatttatttttccctccttgtaacaaacaagtatctctcacttgtatctgtaatattttcgtatgtttcgccgtccaaaacctgcaaaacgcaaagacctgcgttttttagcatacttaaaatttcatcatattcatagtagtgctcaaaaaattcttcatgataatgtccgccggatactttatcgtctattgaaattgagattttggtcttgtgctcgtcatcacacaaagtgttttcccaatggcaatcagcctccggttcaacaaaatcaaatatttgatttcccaaaatatttttatgcttataccgggtgttcatatcaaatataaacaaaccgttagggtcaagaaaaagcgaaactctgttaaataatttttgcacccgccgaccgttttccaaatgatttaccgtgtcaaatgtacaagtgaataagtccacggtaccgtacatatccagccgggttatatcctgctttaaaataagaacattctcggcattattttcgtcctttttatcatataacacatcaagcatttcgtcagaattatcaacagctataacatcataaccggctttatcaaaacgaaaagcaagctctcctgttccacatcctaaatcacacataattccgccgggaacaccgtatttttctgctaattgttttactttaataaataacttatcataatcggcgttgtaattgaagtaatcatagtaataactgaattctttatatgccattactctgccaactccttttcaaacctatcaagtaaagtatcaataccgatatttttttctgcgctggtgaaaataatgtcggaataagaaaactccttacagaactcttcaaatttgccttttgccgcaagagattcggttttatttaatttatctcccttggtaagcgcaatcacaaaaggaatgcggtggtatgacaagtaatccagcattgtataatcatcttttgagggctcgtgtctgcaatccaaaagctgtaccaccaatttaatattctgcgacttttcaaaataagagtttataagatcatcccaacgccggcgctctttatcagaaaccttggcaaatccgtaacccggcaagtcaacaaaatgaatgtttccgtttatattataaaagtttatagtaccggtttttcccggctgacccgatgttctggcaagatttttcctgttgcaaattttattaatcaaacttgatttgccaacattgcttcggccggaaaaaacaatttcaggcacatcggatttcggcaactgttttgcagtaccgtaagccgtcataaattccgcattttttataatcatatttacacctaattcatatttacacttatagcccggtcaactgttttaaccggaataaatttaattttttcttttacaacatcatccacttcttcaagatttggcttatttccatagggaataataaccgttttcattccctcacgatatgcggccatccgcttttcacgcaagccgcctatcggcaatattctgccctgtaaagaaacctcgcctgtcatagccacatcaccctttatttttctgtcggtgagcactgaaagcaaggcggttgttattgtgacccctgcagatgggccgtctttcggcacggcaccttcaggagcatggatatgtaaatcaatcttggaaaagtcatattttataccgtacttttctttatttgcctttatatagcttaaagctatacggcaagattcttccataactttgcccaagttacctgtaatctctaattttccgttgccggttggaataagggcaacttctataggcaacatttcgccgccgacacttgtccaagccaaaccattggccacaccaagcaaatcggcgtgttcattttcgtcacgcttgaacttctcaacgccgagcaaatcttttactttttcttttgtaagagttattttggcaatgtcatccgacaaaatttcttttgcacattttctcaaaagtgttacaatcgttctttcaaggtttcttacgccggcttcccttgtgtaacaatctataatttcataaattgcggcgtcattgaacttaacacagcttttcatagaatttttatcaagctgctttggtatcaaatgcttcttagctatattgaatttttcttctcttgtatagcttggcagctcgataacatccattctgtcaagaagaggccccggaatggaacttctgtcatttgcggttgcaataaagaacaccttactcaaatcaaacggaagatctatataatggtcaacaaaggaattattttgctcgctgtctaagacttcaagcaaagcggcagccggatcccctctgaaatctcccgccaacttatctatctcatccaaaagaataagcggattacttgattttgcgtcaatcatcgtgttgattattttacccggcatggcacctatatatgttcttctgtggccacgaatctcgctttcatcacggacaccgcccaatgacaaacgccgataatttctgccgagacattccgcaacagatttggcaatacttgttttaccaacgcccggagggcctacaagacacaatatctgcccctttgtatcatttgaaatctgccttatcgcaagtatttcaagaactttttctttaactttgtccaagccgtaatgatctctgttaagtattgtttcggctttctttatatcgagctgttctttggtggactcattccaaggtaatgacaaaaccgtatcgaggtatgtgcgaataactgccgcctcctgggaagagcccatcatcttttcaagacggtttacctcttttaaaagtttttccttattttcatttcccatatttgcggctgcaattttttcacggtattcgtcacattctcccgtggtgtcctcaccgtcacccaactcgtcggaaatggtttttatctgctggcgcaagtaatattcacgctggctcttatccatttcactgtgaactttatattttatttcattttcaatttttaaaacttcaatttcattgttcaaatattcaaggacatatttaaggcgtttttcaacggagttttccgccataatattcattttgtcctcaactttaaacataaccgttgcagctaaggcctcccgcagtaaattcgggttttcttcgtcaaaaatcttaccgattatatctcttgatatcttaggagcaacagtaaggtattcttcaaatttctccttaatcgttctaacaagagcctcaacggtgtttaatctatccgaccttattgtttttacaggataaggtttgatgattgcagttaagtaatcaccatcattgcttatgtctacggttttggcacgctcaagagcctctaccatcaccttaataacgccgtcctggtgtttaagtatctgttttacggaagcaagcacacctacatcatatatatccgcctgtgacggatcctcaacggtaatatctgcctgaggtacaaggtacaccagacggttacctttcattgcctcatttattgcatttatcgatttttctctacctacatcaaaatgaaccacactgtccgggaaaatcaccagaccgcgcagtgccacggtaggaaggtgaaaatagtcgatattggtatctgtttttatatttattctttcagacataaatacctcctatgtatataatggtctgtgtttatacattataccaaaaattaaaaatttttcaatattttgtatattcttgtaacaaaagaggcgccgtatttgctaagcacaaatgtacccggcaaacagcgtctcttttaaattttaaagatttacgttttcactataaagtttatgtgccgtaccgtgttcgtatttgcaaacgccggtatttacggcttcttcatctaatataacctttacgattgtattgtcgtcaggcactttaaacatagcgtcctgcaaacattcttcaaagattgagcgcaatgctcttgcaccgctttttctccgaatagccttttcggctataagcccaagagcctcgtccgtaacttcaagttctacattatccaaactgaaaagcgctttatactgtttcaaaagtgaatttttaggttctttcaatatgcggataagggcttctttgtcaagaccggacagaacggaaaccaccggcaatctgccgataagttccggtataagaccaaaatgaaccaaatcatcaggctctacacgttttaacagcgttgtaatgtcctcttcttttttagacttaacctcaccgccaaagcccacagctccgtttttagcggtacgcttggcaatatgcttttgaatgccgtcgaaagcaccgccgcaaatgaacaaaatattctttgtatcaagctggataaattcctgcatagggtgttttctaccaccttgtggcggaacattagcaacagtaccttcaaggattttaagcaaggcctgctgtacaccctcgccgccgacatctcttgtggttgacgggttttcactctttcttgtaatcttatcaatctcatcaacatagatgataccaacttgtgccttttcgatgttaaagtccgccgcctgaatgagcctgagcaagatattttctacatcttcgcccacataaccggcttctgtaagagttgtcgcatcggctattgcaaatggcacatttaacattttggcaagagtttgagccaacagggttttacctgtacctgacggacccaacagaagaatattactcttctgaatttcaacgtcgtcaattttattgttgctcaatattctcttgtaatggttgtaaacagcaacgctcaatgcaatcttagcatcgtcttggccgattacatatttatcaagcccctgctttatctgtaaaggagagagaatatttatatcctctttcttattatttgctcgtctgggtttttttccgggctcttcttccataatcggcataaaaacgccctcgtcccgcaaaatttcccgacaatactcaacacattcgttacagatatttactcccgggccgataatgatcctttcgacttcattggactttttaccgcaaaagctacaagtaacaattttttctttatttgccataactctccgaatatcagtttttatctgtgttctataacccggtcaataaggccgtagttctttgcttcctcggcagacaagaaattatctctgtcggtgtctttggttatttgttccaaagtttgaccggttctctctgcaaggattctgttgagtttttgttttgtccgaacaagatgatctgcatgaatttttatatcagatgcctgaccctgcataccgctgccgccaattagcggttggtgaatcataatttcgctgttcggcaaggcaaatcttttgccttttgtgccggcgcaaagcaaaaatgcacccatagaagcggccatacccatacaaattgtggaaacatcacattttatatattgcattgtatcgtaaattgccataccggcggtaactgaaccgccggggctgtttatatacaagcttatatctttatccggatcttgagcttcaagataaagcaactgtgcaactaccaagctggctgttgtatcatttacttcatccgaaagcattattattctgtcattgagcaaacgggaatagatgtcataagctctttcccctctgcctgtatcttcaactactgttggtaccaatgccataaattaaccctccatttttatacaatagttagtttaggcttagcaataacaattatgcgtttgcaatttcagcgttttctttaacgaaatcaatagctttctgaattgcaagatccgccttaacttcttcctcaggaaccataagtttaagctgatcaatcgggtaaccgtacatatcgctgagctttttaagttctgcctcaaagtcttcatctgttgcaacaatgttttcccgtgctgcaactgcttcaagggcgagtctgatcttaacctgctgttcagcctgatctctgtaagatttcttaaactggtcaagagtcatatctgtgtatttgaggtatgtgtccatatcaagaccctgctgattgagtctgccgataaattcatttgtcaaatcgtcaactcttgtttcatacatagcctcaggaatatttgcgctcataccatttacaagctgcataacaaggtcgttttcaactgcaagctctgctgcactgtcagcctctttttctttctttgctttgatgtcagctttaagctcgtcaagtgtgtcaaaatcacttacatcttttgcgaattcatcgtcaagagccggcaaatccttaacctggatagcattgatctttgtcttgaaaacagccggtttgcctgccaattcttctgcctggtaaggttccgggaatgttacattaacatcaaattcttcaccgacgttgtggccgataacccgttcttcaaaaccgggaataaactgacctgaacccaatgtcaaatcaaagttttcacctttgccgccttcaaaagcaacgccgtcaacaaagccttcaaagtcaatatttgtaatatcgccattctgtgcagctctgtcatcaacgcttacaagtcttgcgtttctgttctgcatattttcaagctctcccgcaataacttcatctgttacttcgatagctttcttttcagccttaagacctttatattcgccgattgtaacgacaggatatgttgtaagttttgctttaacagtaaaaccgtcttcctttgaaacttccgtaacttcaatttctggtcttgcaacaaccttcaaaccggcttctttaaccgcatcctcgtaagcctgtggaagcaattcgtcgatagcgtcgttgaagaacatttctgcgccgtacattttttctacaacgcttctcggtgccttaccttttctgaaaccaggcactgtaatgtctgcatttgcttttctgaacacttttgaaatagctgtctcaaattcgtctgcaggaactttaaattcaagttcaactatattttcttctactttatcatttttgagcaattccatattttttaactccttaattttaattgttctaaattttatgtggtgtacgcagttaaacacactgtgactttttaattataacacaaaaaataagattattcaattatatatggacaaaaattcagggcatctgcagaaattaacttgaattttatgccgtcatacattccgttgaaagcatattttatagttttgccgtgaaggtgtccgtaataacatctttttatatcatactctttcagtgtgtcaagtatgtgttgagcgcgctgttccatataaatcggcggatagtgtaagaatacaatcctctccttgccccgatcagcgtttttcaaatagttcaaggacattttaaggcggccggtttcccttgctataatgcgttcgtcatcgggctggccattttcaaaaatccatcctcgtgtgccgcaaataattttatcttccgcctcaaaggcgttgttgtgcataaattttatggtgatatagttatttgttgtcaaaaattcattcaattttttccgtgttgtccaccaataatcatgatttccctttgaaattattttttgcccgggcagattttctataaagtcaaaatccggctttgcctcatccaatgtaagcccccatgaaatatctccgggaacaacaacagtatcgctgtcttttacaagcctacgccaatttttttctattctttctgcgtgattttcccatccggggaaaatgtccatgggtttgctcacgccaaaagataagtgtaagtctgccaaaacataaattgccaataagccgcctcctttatcaattttttgatatattaatatatgtatgaaaattaaaacagacacaatcagtgtctgttttaattgtacatcataaatttgattaaataatgattaaacagttactttcaagaatatttttttaccttttctgattacaaacctgtcggtaaattcttcttttgcatatgctttttcaatatctgtaaccttttcatcatttacaattacgccgccctgggtaataagtcttcttgcttcagacttgctgcttgcaagttttgttgccgccaacaaatccaaaactccgattttgccgtctgtaaattcattatcggtaagtttaaattcaggcattgtatcgctgtttgcaccactgccgccgaaaagttctctcgaagttttcaaagccttgtcggcatcttcctttgagtgaataagttctgtaagagtgtatgccaaaagctctttggcttcattgtaagcagaaccgccgcgttttacataatcatcaatctgttcaagaggaacaagtgtaagcatcttcaagcatcttgcaacatcggcatcgttgatatttctccaatactggaaaaattcgtaaggtgatgtctttgtcggatcaagccatactgcacccttaactgtcttgcccattttgacgccgtcagctgttgtaagcaagctgaatgttacaccataagcatctttaccatcttttctgcggataagttccgtgccggctaagatatttgaccactggtcactgccgccgaactgtgcgacacagttatggtcgttaaacagacggtagaaatcatatccctgcataagcatgtagttaaattcggtaaacgtaagaccgatttctctgtccattctccgcttaaaagcatcggccgtgagcatcttatttacattgaagtaccagcccacatctctcaaaaagtcgacatagttaagcttgcaaagccagtcggcattgttaagcataagtgcctttccgtctgaaaaatcaaggaatttcttcattgttaccttgaatttttcaccatttgcctcgatttcttccttaggcataacacggcgcatatccgttttgccgcttgggtcgcctatcatacaggtaccgccgccgataagagcaataggtctgtggccgtaaagttgcatatatctcatgatattaagctgcaagaaatggcctacatgaaggctgtccgcagttgggtcaaaaccgatataaaatgttatcttctctttgcccaacaaatcacgaaccaagtcgcgatcggttacattagctataagacctctttcttcaagaaggtcaaatacattgtccggtaatttaattccgttaagctccatttgtttatcctcctgttttaaaggcggtcggcaaaacaaaataaaacgccgactgccaaatttggcagagggcgttagtaataacacggtaccacctctgtttacaatctacctcacggtaaatcgtctcacaaagtacatgacttcttgttctgtaacgggaactcccgtcagtgcctactgtaatttcggactgccgctcaaaagggtattcatcgaaaactcaaagttgtgctttcagcaaccgcacgctttctaaaccgcactttttcgactacttgtctttgtcatagcatttggaatgtatgtacaaatgataacactcaaaaatagttttgtcaaatattttttgcattcaaaatcatttcttttgcattcataagagatgtctctgtaatattttcgccggagataattctcgctatctctctgtctctctcatctccgtgtaattcacgaaccgatgtaaatgtggcgctctcatccgttttcttttctatttgcaaatgattgtcggcaaatgccgctatctgtgccgagtgtgtaacgcacaaaacttgcttacccacagaagtttcttttaaaagcctgcctatcttcatggcagcagagcctgaaacaccggtgtctatttcatcaaaaatcaatgtgtgcgtatcttctttttcggcaagtacattttttattgccaacataattcttgaaagttcaccgccggaagctatctttgaaaggggcttcggcatttcacctttatttgcggaaatcaaaaattctatgttatcttgtccgtcaggtgcaaaatctttcttttccatagacagcgctaaggtgacaaaaggcatattcaaaaattccaatgagtttttaatttcctctgccatttgggcgaatacttcccttctgttgtttgaaagtctgtcggcagatattgtcaacttatcaagaataacctgtctttcccggcaaagtttggaaagattttcccgggcaaactccattttttcaagtttttccttgctctcgttataaaaattcagtatatcttcaacagtggagccatacttcattttcagcttgtagtacaaatcaaggcgctgttcaatttcgtcaatgcgagaaacatccacatcgaaactgtctataaaagattttaaatcatagcctgcgtcctgcgatatagcataggcctcgctaagtttatcgcttatagcttttaattccggtgaaaatgagcttatatttaataaattaccggcagcctcctgcaattcggacactgcaccgaaactttcatcatcgccgaaaatatagttatgtgcccggttggcatttgtcaaaatagtttcggcatttttggctatttgcttttcctgtaagagattttcctcttcttcgattgatatgcctgctttttctatctcgtctatctgatacgataaaagatctaccgtttcttttttgtttttttcagtttcttctatctcacagatttgcctgtttatatctttgtactgccgataaagccggctgtatgtggcttttatggcgctgtcagtaccgaaagaatccagtatttcaatatgctttgacggaataagcaatttttggttgtcatgctgaccgtgaatatttattgcatcggtaaaaagagttttcaaaacgcccacagggtacggcacggagtttatccttgctgtgctctttccgtccgccgtaatttgccttgtgacaatacattcttcggaaatatctatgtccagttctgtcgctttgtcgattatactctgttccaaattattaaacacagcaacaacagaggcctttgccgcccctgttctgacaatatttttggaaactctgtcacccataattgcgttgatagagtcaattataattgacttgcctgcgccggtttcacctgtcaaacaggtaaagccctctttaaaatttatatcggctttttcaataacagccacattttctattataagttcactaagcatagtataaccgttctctcatggaattacttgatatatgttcttattttttcacaaagttgacctgcaactttttcatttcttgtaagaacaaaaattgtattttcgccggcaagggtaccgacaactccgtcccaatggacattatcgaatacttcacatgcaacctgagccattccggtatggcattttataactatggtattcattgcgtagtcaacagacttgatagcctcggaaaagaagtaatcaaacctgttaaatgttgcttttgtatcctctacaatggtattttgcgcatatttatattcgccgttagatgccacgattttaacaagatttaattcctttatatctcttgaaaccgttgcctgggtaacattaaagccttctttttgcaggtattcaagcaaaacttcttgtctgtcaatattatattcgtttatgagtgatagaatttttttatgtcttgcctttttcatctgactatctcctattacttgtttaattgccgacttgcccgacttactatattttcaatgtcttcctcagtgacggtttcgccctccggattttttgatattcttatcaaaaattcaatattgccctccgggcctttgataggtgaaaatgtgatattgtgtacataaaaaccgttttcgttagcataaccgataacattttctataacttcacggtgaaccgcactgtcacggacaactccttttttacccactttttccctgcctgcctcaaactggggttttaccaagcaaactccctcaacatccgaagtagacaccgcaaaggccaccgggaaaatatgtttaagcgatatgaaagcaacatccacgctgaaaaaatctatgggttcgtcaagcatgtccaatgtaacattgcgaatgtttgtgttctccatattttttactctctcgtcagtgcgcaacttccacgcaagctgaccgtagccaacgtcaacggcatatacctttgaagctccgttttgcaacatagcatcggtaaaaccgccggtagatgcgcctatatccatacaaacttttcctgtcaaatccaagttataaagttcgatagccttttcaagtttaagaccgccacggctgacatatttcaaatccttgccacgaacttccaccttgtccgtttctttaatcatttctccggccttatccgatttctgattgtttacatacacgattccggacattataagagcttgagcacgccgtcttgactgtgcataaccctgttcaaaaatatattgatccaatcttattttcatttttcacctgcgaaatctctaactattttttccgtgctcaacccgcaaatatcccaaagttgcggtaccgttccccggtgaaccgtgtaattttccacacagtggcaccgataatttcccttgtatccgttttcaagcagagcaagtccgaatcgtcctgccacaccgccatttttaacatgttcttcatagaaatgaatattcttataatcgaggacattgacaacagcgcccataggtatcgggtttacaacatttaatttaagtatatccacacctatacccttttcttcaagttttcttaccgcatcaaaccgctggctgaaatgtctgccgtaacagacaagaagatttttattcggattttcgattttggattttatcaaatcaaaactttcacctgtgcaccgatagtctttgatattttcttcctgtccacctctggaatagcgcagaacctttgggccgttaacattgtttataagcctttcttcccaatacaacagttcgttgtagtttgaaggacaaaccactattgtgtttttataattggcaaatatgcctatatcgtgtatgccttgatgagtttcaccgtcgccgggcacaagccctgctctgtctatgccaaacatcacattcaagtttaaaagcataacatcgttaatgtactggtccattgccctttgcataaatgtggagtacaagcacacaaccggttccatatcggattttgccaaagcggcagaaaatgtaacggcatgctcctccgccatacccacatcaaaaaatctttctctgtggttgcgatacataaactgtaaaccggtgccatatttcatagcggcggttataccacatattttatcatttgtatccgccatttgagacagttttttaccgaatattgtagagaaagaatccttaggagcaacatcagggtcaggtactttatcaatatcgaaagagccgacaccgtggaattctcccgggttttcttctgccggggcatatccctttccttttaccgttagagcgtgaacaagcacaggaccttttgctctttttgcggcgtcaagagcggcacacattgccaaaacatcgtttccgtctgaaacttggtaataaacaaaccccaaatcctcaaaaaatgttccgcctttaatgatgtttcgtcttaaaaaatcttttgaacctgaaagcatttcggtaagtttaccaccaaccataggcactttattcaatgtgttgacaacgtcctgcttagcgtttaggtaattatccgctgtgcgcagttttgacaaatatcttggcatagcacctacatttttggaaatcgacatcttattgtcattgagaatgactataaggttatcaagatctttatctatgttgttaagtccctcataagccataccgcctgtaaaagcgccgtcgcctataagagcgataacatatcccttttcaccttttattttctttgctcttgccatacccacagccaaagaaattgatgtgctgccgtgaccggcaataaaagcgtcatcttcgctttctgccggtgaaggaaagccggacaatccgccaagtttacgcagagtatcaaatttttccctgcggcctgtgtagagcttatgagtgtagcattggtgcccaacatcaaacacgaacttatccgtaggcgtcgaaaaacagtaatgcattgcggtaactacttccacaacacctaaattagcagataaatgcccgcctgttttagaaacgctttcaatcaaaaaatgtctgacttcttgacacaaaggttcaagtttaaccggtggcaatgcagatacatctctgctgctgtttatattgttaagaatagaatatgacatatttttaacttccttaaaagattgaaatatctgatagttacttatttcttgataaaagatattttgtatattcgataagcaaatcggccttttcgccaaatgcggctttaagccgactgtctgcccgagccgtcatttcccgggcaatctctttggatttttccaaaccgtagagagaaacaaatgtagatttattattttctttgtcactgcccacaggcttgcccagctgtgcggcgtcaccttccacatcaagcacatcatctattatttgaaatacgataccgatattatcaaaaaataaagtaagcgcatctttttgtccagctgtaagttcacagcccaaactgcctaactcaccgcacagggaaatcatcttcccggttttatgtctgtgaatttttgtgagagtttctttgtctgccggcttgtcctcatattccaaatcaagctcttggccgtaaatcattcccttcggtcccatagcccttgcagcggcttgtacagcctttattttcaggctatccagcaagctgtcgtcatttgcaataacttcaagaccacaacctgcaagcgcatcgcccgcaagcattgcggttgcgtaatcaaaagccttatgacaagacggcttgcccctgcgcacatcgtcattgtccatacatggcaaatcgtcgtgaatgagagaatagcagtgaatcatctcaacgccgcaggcacgatacagtgattttttccagtcggcaccacacatatcccgagtgagaaaaacgaatattgcccttgttcttttaccgccattcaacaatgaatattcagctgcctttgcaacgcaagaattatcataaaagaacttatcacaacattcttttaggccgctttcaacataatcaagatatacttttatttccatgattaaatttcttcctcaattctttttatggtaatatcagccttttccaatttgtccgagcagaatttcaaaagcttaacgccttcttcgtacaacttcaaagactcatcaagtcccacttgattttgtgacaaaacatcggaaatttcttccaatctgctcatagccgattcaaatgtctgttccattttttaaattctccctttgctttattcccacaacttcacattcaagttcttgtgtaaatgttagtattttagcggtttctccgaccgtaaagtcacagtgctttacagcgccttccttatcatatatcaatgcatatcctctttttaagttatttaaagggcttccgctttcaagaatatacgcttttagccgaacttcctttttaagcaggtttattttattatttattgaaatatcaaggtttcgttttatttccgctaaatgatttttactcttttccgcaagattgtgaacatataaaaaaccatcggatttttcaatcgacaataaattgttggcaaggatttttatctcatttttaatccgtgagctcatagttctgttcatattcaaaagccgcatatttacagcgttaatatcaggaaagcacaactctgccgcagcggtcggggttgatgctctgacatcacagacaaaatcaaggatggagaagtccacctcatgacctaccgcactgattgtaggctttttacaggcgtaagcagcccttgcaactttttcgctgttgaacacccacaaatcttctttgcttccgccgcctctgccgataattataacctgtatatccggcaaactgtcaagttgttttattgcgtttataatcgtcggttccgcctctgccccttgaaccatacatggggcaagaacgatttcggcacatggaaaacgcctttgtgcaacgcttacaatatcgtgaaatgccgcacctttttccgatgtggcaacacctattttaaaaggatacttaggcagaggctttttcttttcccgatcgaaaagaccttctgcatctaatttattttttattctttcaaattctatccgataagcaccgtcgccgcttctgaacatatttgtggcgtaaatttgataggctccatctctttcgtaaagagacactttaccgcgaattatcaccttcatactattttccggtgtaaatgacaaatttcgcacataggacgaaaacattacaccttttatagcggatttctcgtctttcaacgtgaaatagcagtgtcccgacggatattttttgaaatttgaaagttcgccctctacggcgacatcatatagattatcatcactgtcaagtatagattttacatacaaattaagagatgatactgttaatatttcagccatttttcaactttctgtaagcatttaccgcaacaccgataccgttatcccgtgaatattccgggcttacaaacatcgcctccggcatttgagttttaaaaatttcttttataaccgtggaactcataacgccgccggccataataaccggcaaatcaccgtacattttcttggcgttttgtatcattttaagccgagttgcggcaataaattcaagacaatatctgcaaacatattctttgccaaaacctgatttaagcagattatcacactggttttcaaggccggaaagattgcagtatgtacccttaaccgatacttttgttccacctatgttttctgtacaatttgcggctaagtcagacacatatgcccctgccgggaacggatagcctaatttgactcccaacctgtctacagcctgacctgcgaacaaatccaaagacgaacctattgtttcaacagcattgccgttttgtgcaagcattatatctgtcgttccgccggatatatgcatcataagcacttttctgttaaacaaatcctcgtcatttaagtaatacaaggcacttgtaagatgccctgtttgatgggatgtttccacaacaggaacacctaaggcaccgcctatcgaatatgcccgcattttaccccgtaaaaaacagggcatatacgaattttcatcacttttcgggcgcaccgatacgccaacagcaccgatatgttccggtcctttaaaatctgaaaacacatcggttaagttttttatgtgataaaaaagcgcttgctgttgccttatgcctatttttccctgctcaaccggcaaaaactgttttgtgttaaaaataaccttgtggcagtcgccgtcaactattgaaacagatgtggcataattgcttgtatcaatacccagggtgtacacttacttgtttctcaattcttttgaaattgcacccaaaacaccgtttacaaactgataatcgttttcaccggcatattctttgcagatttccacagcctcattgattataatgctgtccatatcttcgtttgagtacatcatttctgctgtgctaaggcgaagtatagcactgcaaactcttgaaattctcttttgatcccagccttttaattttgactgtatcatatcgttaacttcatctgcatggtcataataaagttttataaggttcatggcaaattcgtcaagcatgtaatcttcatactcaggcaattcctgagtaactgccaatatatcctctaaatcatttgcgctgaagcccgcttcaaaaaccgcaataaaagcattctctctggatttatgtcttgtcatttttaaattccttttatcagccgttgctgatccctcttaaatttttatacttaccgattttcaaaatttttaaaatcagtttaactccgctgtatcggcaacgccggtaacaacaacattaaccttagaaacggtaacgttggtcatattctgcacgccgtccttaacggcctgttgcacatttctgcaaacagtgggtatcttaacaccatagtttacgataatatcaactgtaatttccgcaacgccgtcatataaaacgacatctaccgcctttggcagatttgtttttgcaaacaatcccttaacgccgtaagagcctaccgaaacatcgttaactccctcaacttccattgctgaaagtcttgctatcttttccactgccggaacggatatttgtaatccgccgctttgtcttaatgtgtttttgtattccatatagctttatgcctcccgtaaaagaaaagtaattgcatatattattacatttatgatgaataaaacctgcacataaaagaataatttgcacaaactttatttatattatatcactaatgcataaatataacaatattattttacttctactatgacaatattttgtgacggaattgtggtctttgataaaaccacatctctgattttggcagcatcggctttttccatctctccccggctgcattgaacggcaagagtaatcttttctccggatatacttgccacacaatcggcaaaacctttggctttaaccatattctctatatctgtttcggttgtcatattttctactattgaagaaagttcgcttgtggcattcttcttttcttcatcggtgagttttgaattttttaatgttttttgcaaggtatccaatgcctcatccctgcttttctgccttgcaagccttgcttgccgaaaatacttttcgctgtctgtttttgtggtagccacaagttgagcgtcgccgtaatttttattctcgtaatctgtatcggtcatgagcatatcggtttcgctcattacctcgccgtttgtagcctgagtatctccctcggcgaatatgtattcgtcattgcttgttctggaatattgccaattaagatacactgctaccaccatggcaagacttaaaatccgcagtgacgcttttctctgtctatttatatttttcataattgcctccaaattatcattgcatttttattacacaaattctgtttgtgggtagatttaatgccaccgaaacagcatttgttacattgctgacaacatttatatcgtctgctccacggcaaactacaaccactccctgcaccgacggctgtaaaaccttttccacaagggcatttttctctccgccccgagccaccataacaaactcgttttggtatgtgcttttccgtgacttttggttttggctgttgttaaagacctcttgtgtgtcatctgtggttttttcctgccgagcgtaaacggtttcctctccgctttcaatagtcaccatcactttgacctttcccacaccgtcaatttgcgtaagaatatcagaaagattattttcaatattgcatcgatattcttccgcatctgtttcagcctgaactactttggtttggccgtcggtttttccgttgcctccgattataagcaaaacacccaacagccccaaaaccacataaaggccttttccgtatttttcgcttattttaccgattttgttaaatatatcctcttttttcatatcaatcctcaaaaatcaatactccatcgtctataacaggcgatatacagctttctattatttctttttctgccccattggcaccgccgataatcacctcgcctattttcatttcttcattttgtttaaatatatgcacccgaacggaattataagacaaagaattttcgttaagtattttttcaatcttcgtttttaaattttcttccgccatattcgttatatcagattgccgcagatcgacggaatataaatccgtttcaggtaaagacatatttgtattttttaaattttctcctgttgtgaggcaggtgaatattatatacagtgaacaaactatacgcaaagccttttctgttttgtttaaactcagcccggtggttaccaccccaagcacatagcataaaataaaaaatgcaccaaccgactttaaaaccatactaaaccccatttgtaagagttatcataattgtcacggaaaaaataaacataatcaaaaataatatgataaccgaaagcatcaattcaatcacgtccacaaaaccttttatacacacagacggcccaccgccaaacattccgcttattgcatatgcaaaatatgtacacagccaatatgcggaaaggcttataatagacggcaaaaaaatatatataacggatattatccccacagcgcctgcaaaactctttatagaattcatggcaccgtaaacgctgcttaccgcatcctgtaatgcactgccgataacaggtatagccgtgcctgctatggctttgcccgcttttatcgcaagggcatctgccccggaactgactgcggtttgcaaagaaagcccaacgcaaattatcgaaacaataagttttaaggccgtttttatggcttttaaatagaattcgcacactgtattcaattttatatagtaggacaatccgttggcgacaatcataacaaaaaataatttaagcgacggtataatatagtcaacacatatgttggcaaaaaacacaagtccttgcaaaaagaaccccgttgcaacggctgatgtaccggcatacccgcttgccgccgtaactcccgcatagattgggagaaaggccgtcatatagtttttaacttcaatgagactttcacaagaacttgtgacaatggtgtttataggctctatcagccgtaaaaacacaaacagagtacaaatacaagatattatattttcatttaacccgttgatttttacagtcgagcagacagcagatataattataattccacatagatttatacaaatctttataggcctttgaaatttatctctccgattttccttgatataatcaattaccgttgtaacggtaaaattagatacatcttcttttgttatggaataatcttctgccatactataaatttcatcggcatagttcgtccgtgcataggccgtagaaggtaaagaaaaaatcaaaaatgacagcattaaaatttttattgttcttttcattttattttaaaatctccgtgagaatttcaagtacttgtatatagacaggcaaagcaattaaaagtatagccgccttgccagcaaatatcatctgatttgaaagagacttgtttccgctgtctgccgcaatatcccggacgatttccgtaacaagagctatacccatggctttatataaaatcgaataatcaccaaatccgattgtttctataaagcttttcacttgaataaaatcgtttcggaatgaatttatgatgtaaagtgaaacagctatacagctaaatatcataataatattcctgatatttttatcataaaagggtactgatgaaactaaaataactgtaacaataataattccggcaatttttaatatttccataatcacaactcaaatagatacttaatagtcacaaacagttcttttatttgggttataaccattgataatacaactatcaaccctgtaagcgttgtgagcatcgcctgatcttccctgccggagcgaacaagaacctggtttagcaccgacactattatacctatggcggcaattttaaaaattaaatccacatccattttttactcctaataaagcataataattaaaaccacgccggctgaaattccggtaagtaaacttatttgtttttcgcagtcatattttcgggcatattcccgccgcaaattttccagcttatctacacaggccgaaatatactctatctccctctttttctctctcatccccaaacttttaaaaatatctaatatttgttcgataacattcttatttataaggaaattccctttaattttcaaaaatgatttttcagtttcatttaatgcaaaatttttataaaaataaactttatttttatccaactcattgaaaaactgatcatatgttttgccaagcataacgcaatattttaaattgcttaaaacatatatactttgatttataaattgtaatgtgattaaatcagtcaatgtttcgtaggagaaaaacattatcgacgaacataaaacccggctgcatcctattgccttaaacatcttttaccccctcgattttaaaaattccgttattttgctcaaccaatacgattttatcaaaaactccatttttcaataaaatttgtatatttacctttttgctcatatcatcaaaaccggcacagtgtgcagtgcaaataaatctaactcctgtatttacaccggcaagaatttctctgctttcttcttcgccgccgatttcatcacatataataatatccggatttaaacttcttgtggcatttaatattgccttgcctttgctcatacctgtgataaaatcgcaattcaaattcaagtcaaaaagttcgtttctttcgtcgcacacagctatattttgcgctttcatcagtcggcaaatgctttttaacattgttgttttaccactgtgaggtttacctattatcaaaagacccttggaaaaatcaagtacatctgttggtacggtaaaatatttattcgtaggtatccttatattcatagatgatacggaattcaacctgtattccttattttcatctgagaaaaatataccgcccacacctatccttattccgccgtcaagggttatgtacccatttttgatttcatcctcaaaagcggaaaccgtatgtccgcaaatatataaaaatatttctttgattttttcacagtttataaaagtaccggctatctctttatttttaccgtttatttgcacatatatattttgattggctcgtatgtgaatttcggtgagattattaccgcttttcaaacatatgtcatatatttcccttatttcatcgggaagtttttccaaaataaattttatattcttgtccatcttttcacctttgtaatatatatgaagacttttgcgttattagaacaaaaaaacagccgagaattactctcgactgtcaaatgtattttgtaaaatcaataattttccaaaactttattgtagatattttccgccgtaagaccgtatacttcaagcaattccgttgccggacccgacttgccgaatgtatccattaccgcaaccggaataaccttacaaggtgcctgtgaggagataacctcggtaactgcactgtaaagaccgccgattacgctgtgttcttcggcagtaacaataaattttgtttcctttgatgctgcgataatggcgtctttatcaataggcttaattgtatgcatattgataactcttgcatgaatacccttgttttcttcaagcatttttgccgcatcaagagctcttgacaccataagacctgtggcgataattgtaacgtcatcaccttttttaagctcaacagccttgccaacttcaaatttatagctttcatcattgataaccggcacagcaagtctgccaaatctgagatatacagggcctttaatttcggcagcggcaaaaacagcctgtcttgcttcaatatcgtcacaaggaacaataaccgtcatacccggaattgcacgcataagggcaatatcctcgttgcactggtgagttgcaccgtcttctcccacagaaatgccggcgtgagttgcaccaagtttaacattcaagtgtgggtagccgacggagtttctgatctgttcataagcacggccggctaaaaacattgcaaaagatgagacaaaaggtattttgcctgttgttgacataccggcggcaacgcctaccatattagcttcggctataccgcagtcaaaatgtctgtccggaaattcttttttaaaaatacctgtctttgtggcgcctgcaaggtcggcgtcaaaaacaataacatccggatttactttgcccagctctgtcaaagctttaccatagctttctctggttgcaattttaacttctgacataattacttgccctccaattcttttgagattttatccaaatcctccatagcaatagcatactgttcgtcatttggcgcactgccgtgccatgaggcctgattttccataaatgaaacgcccttgccttttacggatttctgtataataacccaaggcttaccgttcttctcttttgtgttttcaaatgcccggtctatactgtcaaaatcgtgagcatcacactttgcaacattccaaccgaatgccgcaaatttttcgtcaataggataaaccgacataacgtcacttaccttgccgtcaatctgtaagttattgttatcaactattgcaacaaggttgtcaagtttatagtgtgcggcaaacatagcagcttcccaaacctgaccttcttgaatttcaccgtctcccaaaattgtataaacggtgtaatttttatttgaaatttttccggaaagagccatgccaacggcagcagaaataccctgaccgagagagcctgttgtcatatcaacacctggaatatgtttcatatccgggtgtccctgcaaaagagcatttgtttttctaagttttaaaagttcttcctttgcaaaatagcctttttcagccaatgcagaataaagagccggcgccgtgtgaccttttgacagaacaagtctgtctctgtccgggttgtccggggtatttgggtttacattcatcttataaaaataaagatatgtaattgtgtccgcaatggaaagagaaccgcccggatgtccgcttttggcactgtgaacagcggttacaatgtctttacgaatctcaaccgctttcttttcaagcataagttttgtctgtgagtccataaataatcctccttaattgtatgaatctataatttgagccaacaaatatcccactccaccatctgtgcatgacggaacaacaagtcggcaaatttttttaacatcatccggagcgttgtcaacacaaacgcttagtccggcatttttaagtatttccaaatcgttatagtaatcccctacaacgattgtattttctttcgacaaatccataagtcggcagagattatcaagagctttgccctttgatattcccttgggcataatttcaaaatacatagtatttgtcatcataaaatccaaatcgtcacaatttaagctttcacagtacttttgcatttcaagcaacaagccgtgattgccggcgaaaagaacttttatccagttgttagttatattttctatctcggtgtcgatatatcctatcttttcctcaataaaatgctctgttgtatattcgttttccctaataagataagccctgaaattatcgcacataacttcacagcctacatctggaaatttttccaaaatgtcccttaaaacatcttttacggattccggcaacactttacgatagagtattcttccgcttgcaaagtcatatataaccccaccgttataagtaatcgcgggggcgttaaatttaactttacccaaaagcctgcttaccgcttctacatttctgccggttgcagttgtaaacctaccgccgagactttgaaatttttcaatcatttcgatgttataggcggg

SEQ ID NO: 4489 - DNA, 3319 bp, Unknown
  16S sequences of unknown bacteria
gggcgtggcaacggcccattccgtccgtcagacggcctttgccggacgggcgctgcccatggtgggtatgctgctgctgatctgggcgttttcctacactttgttttccctgcatggggcggatctgccgattttcacagaaacgatgctgtctctgccggaagcatgggctgtatggtgaaatgaaaaaagcgcgcctgtacaaggcgcgcttttcaattgtatacaacggatataaagaagcgtcatggaacacctgctgagccatggaactctgtgaccgaaaatgctcctatgtacactgtaaacagtttttgcgatgattcatggctcgggaaagtgaaccatggtgttttttttatctcgggcaatggctttggcgtaacgatcctcttcgctgaaaatgcagccgcagtatttttgcatgtaaaagcccagggctttggctttttcgtggccatcccaaaagccggggcgaaaatcgcggtagaggaacggaacgccgtatttatgcgctacggtttcgcccagcgtacggatcagttcgtgatcctgataaggggagatgagcagcgtggtggaaaaactgtcaaagccattttctgcggcatagcgggcagtgcggtccagacggcaggcatagcaatagcggcagcggtggtcgatgtcggctgccacagcctgtacaaaaggccgcaggccatagtcctcgtccaccaccagggtcatggaaatagtgggcgcataggatacgagcgtgtcccgccgggctttgtattcctggtaagggtggatagtggggttgtaccaatatgcggtgggctcgataccttcgccccgcaggtcttcgatgcagcgcaccgagcagggggcgcagcagcagtgcagcagtgtgttcggcatgggaaaagactccttgcaatggtttttctttatcctatcacaccgaaaaactcctggcaagggtggaatttgcgttgacgtgttcggcggatttgtagtataatactacgatatgatgcccttactatagataagatcaaggagaacgaacgacgatgtggatcgcggagaattggaaggattatgaactgctggactgtggcgatggcgagaaactggagcgctggggacggcagatcctggtgcgcccggacccccaagccatatgggaagcgccccggcgcagcagtgcctggcagaacccggatgcccgttatctccggtccaataccggcggcgggcattgggagcggcgcaagcttccggagcagtggacggtgcagtacggagagctgacgttcaatgttaagcccatgaattttaagcatacgggcctgtttcccgaacaggcggtcaactgggattttgtcatggagaaaattcgccgtgccgggcggccgattcaggtactcaatttgtttgcctataccggtggggccaccgtggcctgtgcggcggcgggagccagcgtctgccatgtcgatgcagccaaaggcatggtggcctgggcgaaagagaacgcccgctcgtccggtttggcggatgcgcccattcgctggatcgtggatgactgcgcgaaattcgtggagcgggagatccgccggggccgccggtacgatgccattatcatggatccgccttcttacggccggggtccttccggagaggtgtggaagctggagcagaacctgtatcctttcgtcaaactctgcgctggggtactttcggacgatccgctgtttgtgattctcaattcctatacaacgggtttggcgccttcggtgctgggctatattctgaaccttctggtgagcggaacctacgggggccatacggaatgtgcggagctgggcctgcccgtcaccgaaacgggcatggcactgccctgcggcgctacgggtcgctggatcgcggacgattaacggagcggaataagaatggaaatgctgagagcggaggaactgtgtttttcctatcctgccggggaaggagaggcgcgtgttcccgttttggatcatgtgaatctgaccattgagaaaggcagtattgtggcggttttgggtcacaacggcagtgggaaatccacgctggccaagcagttcaacgcggtgtatcttcccagtggtggcaaaatgtgggtcgaacagtttgatacggccaacgaagcggttttgctggagatccgccgccgggtcggtatggtatttcagaacccggacaatcagattgttgccaacgtggtggaagaagatgtggcctttgctccggaaaatctgggcgtgtccactgaggaaatccgccgccgggtggatgacgctctggctgcggtggggatgagcgacttcacccgccatgcgcctcacctgctctccggcgggcagaagcagcgcgttgccattgcgggcgtgcttgccatggagccggagtgtattgtgctggacgaagcgaccgctatgctggatccccggggccggcgggacgtactggatacagtgcgtcggctgaaccgggacaagggaatgaccgtagtaatgatcacccatcatatggatgaggcggagctggcggaccgcgtggttgtgctcaatcatgggcaggtgtatctcgatggtgcaccgaaggaaatcttccagcaggtggagcagctgcgctccattggccttactgtgccggaaacggtgaagctgctctacgatctgcatcaggaggggatggacgtgttgctgtccgccatttcggtggaggagtgcgccgacgccgtctgccgggcgctgcaggcatgcggcgtggaagaatctgtttccgaaagggaaaacgaacgtggaaccaattatcaaagttgacaatctgacacatacatacagtgccggcacgccgtttgagcgtaacgcagtggagcatatctcctttgaggcttatcccggggagttcataggtgtgatcggacatacaggctccgggaagtctactttcattcaacaccttaacgggttgctccgtcctaccgaagggcatgtgtattttcgggggcaggatatctggtccgccccgaaagtcacccatgccatccggttccatgtgggcttggtgtttcaatatccggaataccagttgtttgaggaaacggtttataaggatattgcgttcgggccggcgaatatgggactgggcgaaaaggaaattgaccgccgggtacgagaggccgcgggttttgtggggctgggagacgcgctcctggaaaaatcaccttttgaattgtccggtgggcagaagcgtcgggcagccatggcgggagggtttgccatggagccggaag

SEQ ID NO: 4490 - DNA, 7537 bp, Unknown
  16S sequences of unknown bacteria
gagcggctgcggcgctgtccgtcgatagcggcagaggtggaaaagcagatgcgctctctgctggcccggatcggtccgcaggcagcggcttattttctggcgtccgttccgcagtttacggcgaaattcaccatgttcgctgatcagggatatgatttcctggtcggaaattcgttacagcagcggcgcaagctcgccttgcgccgttatggcgatcctgcgcagaccgtgctgctgatgcgcagcctgcgcggcctttcggatatcgagcagatcaacgagcggatcagcgcggctgaattgagcgtttatgacctgatggatgttctcgatcagctcgttttgcatgaggaagaatatgcagagttatttgcgtgctgggatgaagagagccttgcagtcctgcttgaggcgctcatggaggagcacggcgccgaggcaatcagcgatctgaaggagagcgatcgtccatggacagcggctttagcggtatggatggtggatgcgtcgtcggcgccgcagatcaaggcgctgatgcatcatacggaaatctgctggcactgaatgaaaaaaagcccgatccattcaggcttttttcatgacgatgcattttttcgggcaagcatcggcgcacagtccgcatcctacgcatttctgctcatcgacttgccattgcttgtcaggccggctgaccgtgatcgcctgcttcggacatttgcgggcgcacagcccgcagaacacgcagtagtcagatgcctgcggcagcttgcgctcttgtttggggtgggtatatgtttcggtgtgctttttggtgtctgggggcgtatagccttgttccatgtacagacattttttggggcagacatttacgcagctgccgcattgcacgcagtcaaagcggtcgatggaccaggtgccggcagcgcggtcaacggtgatggcgcgcggcgggcagttctgagcgcataaggtgcagctgatgcactgatcgatatcgatgcggatatggccgcgcatgcgctgcgggtaaatcgccggttcctcagggtaattgaccgtgaccggaggcgaggtcatatttttcagcacttcgcgtgtgaaggaaaacaatttgatctttcgcatgtgctcacctctctgtacagctgatgcaaggatcaatggtcaggatgagcagggccacatcgcccaactgacatcctttcagcagatcgagcatcggcgggatattgctcgtggtcggggtgcgcagccggaagcggtccagaaatttggtgccgtttcctttcgtataatagatggcttcgccgcggggctgttcaatgcggatgaatgcttcgcctttgggcatgcctttgaccggcacgctgagctcgccctgggggatcttggagatgatctcctcgatgagctcaaaggattgaaagagctcggcgatgcgcacttttacccgggcataggagtcgccttctacggcggtgatggggccgaagttcagctcatcgtaggccgcatagcccgtctcccgggcatcatagtcgatgccgctggccctcagcatcgggcctacggcgccggcgagcagcgcttgttctttgtccagatgaccgagcccgcgcagccgggcgttcacgctggcatcctccaggaaggtttgggcgatcgggcgcagttcctcgttcatcgctttcatggtagagcggatcgcgctgagcatgtcttcgtccatgtctttgagcacgccgccgacctggttgaccgagaagatgatgcggccgccggtcgtcatgtcgaagagatcgagcactttttcccgcaggcgccatgactgcatgaacaggctctcaaagcccagggcatcggcgagcaggcccagccacagaaggtgggagtgcacgcggctcatctccatccacagggtgcgcaggaaccgcgccctgcgcggcacgtcgatgcccatcatctgctcgatgctctgacagtagcccaggccatgtccgaagctgcagatgccgcagacgcgttcggccacatagacatattgcttgaagtctctggtctcgaccagcttttccagcccgcggtgcacgaagccgatattggggatggcttcgacgacgacttcatcttccaggaccaaatcgagatggatcggctctggcaggaccgggtgctgcgggccaaagggaatggtgctgcgttttgccatcatttcacccctttctgcgcaaacggcgtttcggtatcgatgcgatacaatttgtgtttataatccatcgtgatgcctttgatgcgcacgccgaacagctctgccgcttcgttctcttgcaggaaggcgcaaggatagacctgggtgatgctgacgatcggctcttctttttccagttccagccgcagcgtatccatgtctggtccattgacgaaggtgtagctcagctcatagccatcttctgtgcggacagcgcacatttgcgcgaaacgccagccgtccatcttcttgcggacgacattgggaaaaaagtcttgtttttcgatgggaatgatatggtcactcatcttgaccgccttctttctttttctctaggatctcaactgcctgcaatactccatcgatgatggactgggggcgggccgcgcagcctggcacgtagacatcgaccgggatcacggtatcgatgccgcccaggatattgtagcactccttgaagatgccgccggtgcaggcgcatatgcctacggcgacgacgaccttgggatttggcatctgggaatagatctgtttgaccacctgggcactttgggcgtttacgccgccggtgatcagcaggatgtctgcgtgaaagggattgccagtgttgatgatgccgaagcgttcgatgtcatatttgggggtggtgcatgccagcacctcgatgtcacagccgttgcagctgctggcatcataatgcagcatccacggcgatcttttcaatttgttcatgatggtcacctacctgatggacatgaggatgaggatgttgatgccgccggccagcagcgtgatcagccagcagacatccagcacctgtttccagttgagccgggcgcatacgttatcgatcaggatctcgataaagtagacgaacagcgtgagcgcgatggcgatcggccagctgaggggagaagcgttgatgaagaagatggcgacgatgcccagcagcagcatcttctcataatattctccgatctccatgacggcgagcgtcgggccggacatctcggtcgtgatgcccttgaccatctcctggtgggcatgatgtgaggtcgacaggtcaaacggggacttgcgcagcttgatggccatgatcaggatgaagccgatgaacaggccgggcatgagccagatggcgctggtcgggctggcgatgatgtcttccacgcggaatgaaccggtggagagatagaagccgaccgcgatgagcagcgtcatcggctcataagacatcatctgcagcatctcgcggcttgcgcccatattggaaaagggggaagagtcgctgcaggcggccaggatcaggaacatgtcggcagtcgacaggatgaacagcgacatcaggatatccgagccgaagaacaagatgccgccggcgatggccagaaaggccagatagctcaggttgagcagcagctgcacgctgttcacggcgatcatctgcttggaaaacagcttgatcaggtcatagaagggctgcaagagctttggtcccttcctgccttgcatgcgggcggtgatcttgcggtccacgccgtccagcaatgcgccggcaaacggggcgagacacagatacagcagcagcgaaacgactttgatcatcataacacacctcccagcagcagcgcgaatatgacgatgagcacactggctgaaatgatctcggcgggcttcagcagccgtcgtctgcccatctggaaacgcaggtaccagttggtcagatagagcttgcgcggttcgcccaggctgccggtgtaatgcgtgttgtctccctcattgatgccgcacatgtaggtcggcacatattcccggtgcgtggagcgggagatcaggaacatgactgcagggacgatgagcacgctgaacaccatgatgaccatggtcgtcagttcgctcatcgagagcacctcggtcgtttggccaaacagcgtgagcacgatcgggttgacgatctgccgcgccagctccggaaacagcaggcagagcaggatcatgatcgcacccaggacgtgcatcgagaaatactcactcttgcgggtcaggtctttttccgggttgcgcggctgatgcatggcgatgagcttgcccagccacttggtccagtaaaacatcgtcgtcgcgctgccgaaggcgatgaagatgacgaggatgacatttccggaatccacgaatgatttcagggcgacccatttgctgatgagcatgccgaagggggctagatacatgccggcgatgccgatgcccatgatatacgccagcttgggcagacgcaggatcaggccgtgcatgtgttcgatatcgcgggaaccgatgctgttttccgtggcgcccacggcttcaaacaacatcgatttgctgacggaatggaagatcatgagcaggatggcagcccatacggtctcttccacgccgatgccggcgcaggcgacgatcagtcccagattggagacggtggaaaaggcgagcaccttcttggcgtcgttctgggcgatcgccatcatgctggcagcgatgaaggtgaagccgccgatgaaggccaccatcgcaccggtcagcgtgccatataatgcgggggaaaggcggatgagcaggtaaacgcctgccttgaccatcgtggcgctgtgcagcagcgcagaggatggggtaggcgccaccatcgctccatacagccaggtggaaaacggcagctgcgccgacttggtgaggccggccagggccagacaggcgatgatgaactgattgccgctgtcgatgacatcgctgagctgcacgctgtggcggttgagcgcgcaaagccagattgccacggcaaagcccagtccgcccagcaggttcatccacagcgcgcggaagctgttgtccactgcctcctgcgtgcgggtatagccgatcaggatgaaggagatcacgctggtgatctcccagaagaaatagatccagatcaggttggaggagagcacgagagcgaacatcgccgacatgaagacaaacagcatcgacaggaaaagcgagctgcggtccgtatattcacggtgatgctggtgatagctcttcatgtagccgctcgcgtatacggcgatcagtccgccgaccacggcgcagatgacgcacatcagcagcgcgagcgcatcgacctgcgtatgggtggattccaccagcgggatcgtctgctccacccacagcatcaatgcggtctgggcgatggagaacagcgcgatccattttttccggtggatgaaacactgatagatgatgaacagcatcagcgcgatctccaccgtctgcatcagatggtcgagggcggatgtcctggtatacaggttccatgtcgcttgatcgtccaccagccacatcgcgatgatggcagccgtgcatgccaggatcaggaagacagagacgtagatgatcaggctgcgaatcttttcctttttgcagatcaagatcaggatggcgctgagcagcggcatcaggatcaaagcgggtatcagggtcatattcacaccttccattcatgtaatcaatatccaaagttaattatagcgctaaatgaaagaggtttccattcaatttttcggctttcaggagtataatacagtcatgcatgaattggagatcacacaacatatattagcagacagcatccgggaggcagagcgtcatggcgcgaaggccatccgggagatcaggctggccatcggcccgttttcaggcttcgtccccgagtgcatccagatgtacatggatgtgctggcagaagggacgatcgcgcagggggcgcgcatcaagacgcggatcatcccgcttcgcgtcctttgccaagactgcgggaaaacttcgcagatcgatcggacacatatcgaatgtccgcactgccatggcctgaacctgaaacggctgtctggaaatgaatgcatgatcgagagtctggaggttgattgaagtggagatcaaggtctatcatcagatcatggactggaacgaagatgtgtctgcgcaggtgaagcagacgctgaaggcgcatcatacgctgctggtcaatgtcatgggatcgccgggcgcgggcaagaccagcctgatcacggcgctgatcgcgcggctgcgcgatacattcaggatcggggtgatcgagggagacatcacgacatcttatgacgcgcaggccatcgcgaagctgggcatccccagcgtggagctcaacacggacggcgcctgccacatcgaggcgatgagcattcagaagatccttccggaattcagcctggatgcgctcgatgtcctctttgtggaaaacatcggcaatctcgtctgtccggctgaatttgacatcggggagaatctgcgcatcaccatcctgagcgtgccggaaggcgatgacaaggtggagaaatacccgctgatgttcaccgagaccgactgtctcgtcctcaacaaggcggatgtgctgccttattttgattttgatctggaacgggtcaaagagaactatcacggcgtgaatccgggcgcgccgctctttgcggtgagcgccagaagcgaagaaggcctggatgcgctttgcgcgcatctgcgcgaacgctttgttcagctgctggatgaaacacgttgagatcagcgcttacggcatcgtgcaaggggtgggcttccgcccctttgtccatcgcctggccaagcagtgcgcgttgagcggcagcgtgtgcaacagcggcagcggcgcgctcatccacgttcagggcgaagaggaggacatctctggtttcctgaagcggctggaagaggaagcaccgccgctttgccgcatcgaaacgctggaatgccgtgagctgccctgtgcgcagatgagcggctttcagatcctggaaagcagcgcaggagagcgaaacaccatgatctccccggatatcgcgccttgcgcggactgtctgcgcgagctggatgatcctgcggaccgccgttaccgctatcctttcatcaactgcaccaactgcgggccgcgttattcgatcatcacggatatcccgtatgaccgctgtcatacgaccatgagcgagtttgagatgtgcgcggactgcgcaaaggaatatggcgatcccatggaccgccgctatcatgcgcagcccgatgcctgcgcggcatgcgggccgaagctgatctatcatggtcagggcgaagccagcggcgaagcggccttgcgcgcggccttgcgtgatctgaaagcaggcaggatcgtcgcggtgaaaggcgtaggcggcatccatctcgctgtcgatgcctgtaacaaagcggcgg

SEQ ID NO: 4491 - DNA, 6640 bp, Unknown
  16S sequences of unknown bacteria
ggcccaggccgggcagcgggtgtttgtccggcaggtggccccggcgcggaaggacgaaattctatttgccgcccggcatttgttttcccccggcggtgcggcctggtccgggacggcgtcgtgcgtgcatctgcggcggtttgacggcccgtttgcccaggcccaggccgtggcggcgacgattttgcagctgctgcgccagggcttccgctatcgggagatcgctgtcgccgcggcggacgaccccgccggacgcacggccctgcagaccgtcctgcggcagtatggcatccccgcgtattttgccgggcagcggcccctgctgcaggagccggtgtttgaaatggtcctggccgcgctggacgccgccaccggcggcctggagcgggaggacgttctgcgctggctcaaatccggcctggcaggcgtcgcgcgggcggatgttgacttgcttgaaaattacgccctcatctggaacatctccggcagccgctgggcgtctgcttggacggcccaccccgcgggctacgacgccgcgtgggacgacgatgcccgggctcagcttgcccatctgaacgagctgcgcgcccaggccctggccccgctgctgcgcctgcgccgcgccctggagtcggcggccgccgccgggccgatggtccaggcattttacgcatttttggaagagatcgggctggacggccagctggagcagcaggcccaggcccagtatgacgcgggccagctccaggcgtcccagcagacggcccagctgcatgagatcctcatcggcgccctggagcagatgtacagcctcctggccgcgacgcccgtcgaggcggcccagtttgcccagctgctgcaggtgctgctgcagcagtatcatgtggccagcatcccggcggcgctggattgcgtcgtctgcggcggcatcggtgatctgcggttccatacgccccgggcgctgctgctgacgggctgcgatgagggcgtgctgccccagtatgcggcccccaccggcgtcttcagtgaccaggagcgggcgcagctgcaggccctgggcatcgccctcgcgccggacagctggcgcaccctctcccgggaccttgccgtgctgcaccagctgctgctgggctgcggcgcgcagctgttctggttctgcgcgacggagcagccgtcgtacctgcagctgcggatggagcggctgttcccaacccgcctggctgaatatgaagcgctgcaatatcccccggaattttcggaccccgccctgctggcggcgtccgccgtcctgcccgagggcggtccggcggcccaggcggccgccctcttggacgatgccactgtcaacgaccgaatggcggcgctgcgccagcgggcggcctatacgccgggtctgctgcagcgcgcgacggtgacggggctctatggtcagaagctgtacctctccgcgtcccagatccagacctttgccgggtgccgccaggcgcattttctgcgctatggcatcaaggcccggcctcgggcccgggcggagtttaacgccccggtctatgggacgttcgttcacgccgtgctggagcagacggtccggcaggtgcaggcccagggcggctttgccagcgtcccgccggagaccgttgaggccatcgcccgggcgcagatggacgcctgcgccgccgcgctgcgccccggcccggaggtcgagacgccccgctttacgtatctgttccaaagaaattatacggagatcctgactgtcatccgggagctggacggcgagctgcgccagtcccgctttgagccggtgcgctttgaactgcccttccggcccggcacgccgatggggcccgtcgaaattcagggtaagtccggggcggcgctgcttaccggcgcagtcgaccgggtcgacctgctgcacacgccccagggcgactatgtccgcgtcgtggattataagacgggccaccgggattttgattacaccgatcttctcaccggcctgggcctgcagatgctgctgtatctcttcgccctggaggaaaacggcgcccgggagtttggcggcccggtgaagccggcgggcgttttgtattttcctgcccggtgcaatctgctgacgctgccccagccgccggcgccggatgcgctggccgctgtgcggcagaaggacctgcgccgccagggcctgctcctagatgacgaggcgctgctgcaggccatggagcccgccgagggcacgccccggtacctgccctacagtgtcaaaaaagacgggcgcagcggcgatctggccagccccgcgcagctggcactgctgcggcagcatgtgcgccgcctgctggccggaatgaccgacgagctttttgctgggaagatcaccgccaacccctacagccgcggcgccaccggcgcctgcacctattgcgattacgccccaatctgccacccagacccgtcccagctccgccgcctgcaggcgacgggcgcggcggaattctgggcgcgcctggcaaaggaggaggaagaacatggcaaagtttgaactgaccccccagcagcgccaggctgtggaggagacgggcggggccctgctcgtcagcgccgcggcgggctccggcaagacaaaggtcctggtcgatcgcctgctgcgccaggtcaccaagccgggggacgcttgcaatgtcgatgattttctgatcatcacctatacccgcgccgccgccggggagctccggggcaagatcgccgccgccctgcaggagcgcctggcagagtcgccggacgatctgcatctgcagcggcagctgcaccgggtctacttagcccagatctcgacggtccacgccttctgcgcccagctgctgcggcagtatgccgcccagacgcagctgccggtggatttccgcgtcgccgaggagagcgactgcgcccagctgcgggcgcagaccctggagcgggtcctggaggaggcgtatgccgcgctggagcgcgaaccggacgcccaattctttctcgataccctgggggcgggccgatccgatgcccgggccgccgccctgatcgaccagctgtttgacaaggccgtctgtcagccggacccggacgcctggctcgcccgctgcggccagcccgacggcaagacgccggacgagacgccctggggcaagctgctgctggcccactaccgcgaggtcatcacccggctgcgggcgatgctggaggcggcaggggcgagtcttgccgtggacgatgtcttgcaggaaaaatacgccccggctctccaggcggacctggcccagctggaccgcctggcaggggcggtgacatgggaagaaatttatgccgcccgtcagctggaattcatcccactggcccgcgccgggaaggacgccgacccggtgttaaaggcccaaatccaggcggcccgcaaggaggagaaggagcagctgacccgtctgcttaccctcttcagcgctccggcagcggagacgatggccgagcaggcccagtgcagccgggccatccgcggcctggtcagcttgacccgccgctttgctgcccgctggcggcaggaaaagcgtcgccgcaaatggctggatttctccgaccttgagcaggagacccggcggctgctctgtacccccggcggcgcgcccacggcgatcgcccgggaggtctcccagcgctaccgggagatcatggtggacgaataccaggattccaaccgcctgcaagacagcatcttcttcgccatctcccgggaagggaaaaatgtattcctcgtcggcgacgtgaagcagtccatctatcgcttccggctggcggacccaacgattttcctggaaaaataccgcgcctggcccaactgcgcagaggctttgccgggacagccccgctgcattctgctctcccagaatttccgctcccgggcggagatcctggacgcgacgaatgacatttgccgcgacgccatgagccaggccgtgggcgatgtggattataacgacgccgaggccctccgctgcggccgggttctggtggagccgccccagcagacggtggagctgcactgcatcgaccttgcctatgacgacgagacggagcacccggaaaagcgggatgctgaggccgcctgggtcgcccagcgcatcgagggcctgctgcgggaggcggcttatgtcgccacccccaccggtccgcgccgggtcgaggctggggatattgtgatcctgctgagcacgatgcgctccgtcgctccggcctatgtccgggcgctgcagcagcggggcatccccgtctcctgcgaccaggagggcgatctgctggcctgcccggagattacgcagctggtctccctgctgcaggtgatcgacaatccccaccaagacatccccctctacgcggccctggcaagcccgctcctgggctttaccgccgatgagatcgcccaggcccgggccgggcggcggcagggcgatctgtatgcttgcctgcaggctcacgccgagacggatgagaaaacggtcaactttttggagcagctgcgcgcctggcgcgcctgggcggcccagctgccggtggatgcgcttttggcggagctctaccgggcgctggacctgaccggcgtcttcggcgcaatgccgtctggcagcgcgcgcatcagccacctgcgggactttttctgcctggcgtctggtgcggtgcaggccggtaacggctggctgcacggcttcctgcgccagctggagggccgcgccgcccagggcatcccgctgcgtcagcaggcgtccagcggcgcggtccggatcatgagcattcacaaatccaaggggctggaatttcccgtcgtcatcctggcggggctctccaagcggttcaacctgcaggatatgacggccccggtgctgctgcacccccagctgggcgcggcggtgaacgtcgtcgatttggcgggccgcgtgcagtacccgtcggcggccaagcgggccatggcgctacagctgcggcgggagatggtctcggaggagctgcgagtcctgtatgtcgccctgacccgggcgcgggatatgctcatcatgacctacgcccagtccggccttgtcaagcagctggcgcagctggtctggcagctggattggctgccccggcctgcgctgtcggccaaggcagcgcgcctgggcgactgggtcctgcagcacgcgatgcagcgcgtcgaggctggggcgctctttgccgccgccgggcggccccagcagctgaagaccgggggtgcgccctggcgcatctgcctgcacgacgggcaggccgtcttggatgcgatggccgccccggccccggcggtgcaggctatcccggcgcaagacgacggccccgccctctccggcccggcgctgcggcagtggatggccttccagtaccccgatgccgccctggcccaggtgccctctaaaatcacggcgacgcagctcaagggccgcttcctcgaccaggaggtcggcgatgcgccgctgccgctgcgcctacgcaaggccagcttccaggcgggcccccagcccctgcgcccggcccagatcggcacggcgacgcatcttgccatgcaatttttgcgctacgaggcctgtaccacactggcggacacccaggcggagattgccaggctccagcgggaggaatatctgacgcccgcccaggccgaggccgtcagcagcgagaagatatggcggctgttccaaagcccgctgggccagcggatcttaaacgcgccggattgcatccgggagtttaaattctccgtcctggccgatgccggggcctatttcccccaggccgccgggcaggaaatcatgctccaaggcgtgacggactgttgcctggtcgaaccggcgggcctggtcgtcatcgacttcaagacggaccgcgtcacagcccagacgcagacccgcgccgccgcatattatcagggccagctggacgcctatgccaaggccctggcggaaattttccaaaagccggtgcaggagaagctcctctatttctttgccaccgaggagacggtcccggtctgacgaagcgtccggtacagcggcctgctgaaatctgaaaagcccccggcagagatacgtctctgccgggggtcgtgtgttggatgcaggggtggctcaagggctgcaagcgcatttgagcggcacctgtatccggcggcgcagcgcagatgggacgcgcctgccgcgtgcgcagcagcgcattactgctggttcgtcttctggttctggttctgctgattctgctgctgattctgctgctgattcgtcttctggttctgcttctgatttctgttttccatggtaggaagcctcctgttctttgaagttttgcggccttgccgcagcgttagtatgcccctgcgcccggcgcttatgcgtccgtcccggtcaggatttatcccggggccggaagcacagtgccgccagcagcccgaagaagaccgccgccgtaacgccgcccgccgcggcctccagcccgccggtgaggatgcccagccagccccgtttgtcgatggccgcccggacgccctttgccagcagattgccgaagcccgtcagagggactgacgcgcctgcgccgccccagtccatcagct

SEQ ID NO: 4492 - DNA, 3737 bp, Unknown
  16S sequences of unknown bacteria
gtgcggggcggcagcactccttgctgtcgccccttgattgcctatctgcaaaggcagacggggctgtcaacggcggcacaaagcaacgttcattttactgttgactggctcagctggctttgtgctattgccttgtagtaaacacaaatagaaatgattgctgtaatcgcttctgtgatccaaaacgcattccagacgccaaccgctccgaaaaacctgctgagtaaaaacgcagttgggatgataaccacaacataccggcaaagtgaaatcagtaatgaaggagcgccttttccaagtccctccagtgcgccggaagatgtaacggaaaccgccgagacgataaaaccggcgccgatgatacgcagggctgtttccccggtctggattgtcgcttctgtgtgggtaaacagacccataagctggccggggatcagcagacatatcactgtcccaagcaccataatgataccactcatgcacaaaacgatcttaaagatctggctgacccgttggtgttcccccgcgccgtagttatagccgatcagggggcgcatcccctgcacaatgccattcgccggaagatagatgaaggtctgcaatttgtaatagattcccaaaaccagaatatacacttcggaataggcagctaaaatcgcattgagcgccgaaatcaaaagagacggaagcgcgagattcagggttgcgggaatgccaatggagtacagctttattaccatctttttgctggggagaatgtactgcctgcggatatgcacgcgaattggccgcgcaagatagactacaaggtaaatcgtcagcgtcagagcctgtccgatgccggtcgccagcgcagcgccttcgattcccatttccgggaatgggccatagccaaaaatcagaacggggtctaagacaatgtttgtgatgcacccgcacatcaggcttatcatggtcgttttcatgtttcctactgcctggaacaatttctcaaacgccatgctgacggtaataatgagtgtaaaggcgaacgcaacgacagaatagcggacgccaagttcaatgaccgcttcggatgaagtaaacatccgcaggaaaaccggcatgatcgtaatacagcagactgtcataacaacgccatgaatcacggcaagcacaagtccctgcgtggctgcctgatccgctttttcatgatccccagcgcccaaatgaatggcgattacggcgttgattccaacgccaaatccaattccaacagcattgataaaattttgaaccgggtaaaccaacgataatgccgtcatagcctcctcgctgatctgcgcgacgaaaaaactgtccacaatgttgtagagggaattgaccagcatggataacaccataggcagggtcatggataaaatcagcggtaataccggtttttctttcataaaagtttcattcattcgtgattgcctccggtgtttcttttcttgtcataaaacagatcggatcttttcggaagccaaagggttcataaaactgttcagcctcttccgtgatcagcattcccagcagggaacggtatgtgtcttctgccgtaatcgcctttaggagagaggcgcccacacccctgtgccggaaatctgcatccacaacaacatcacaaatataatactgggtggcatagtctgttatcactcttgcaaatccgatttgttttccgtcggcggtataggctccatagcagatagagtgtttccatgactccataattgcttctttctttctgttgcatgcccatacggtctgtgatagaaggcgaagtacggtttctgtttgcagagcatccagcccttttttaatatgtatttccatatcgtctctccttttcctgttcttactgtgtttttgtaccgctgcaaagcgtttctttttttctgcctgctcggaagatcagaagcgccagaacgaatgttgccgtttctgtgacagggaaggacagccagatccctgtaatcttcaggagtttttccaggccccacatgaatgaaatgagcagcagaaactgacgcagtagctgaatcagtatacttggaaagacctgttctgttgcctgaagataggtggagatcatggtagaccatccgcagaacaggtagctgaccgccataatccgcatagcggatattccaaaggagcgcatggcttccgacgccgtaaataatcccaaaagctgcgccggaaagaggatgacggtcaatgttcccagtatcatcataccggagaccaaagcggttccgtagcggaaagcagagtgcagcctatctctgtttcccgcaccgtagttgaaccgcataataggaagacagccctggatcagcccgttgaccgtcatgacaatcaactgctgcaccttaaaatacgcaccgaagaaagcgattgccgtatcggaataggcgaccagaaaaaagtttacaaaagtcaccataaaagaactaagggcattcataataaaagacggcagtccaagggtgaaaatacggccaatcagccacttttgcaaatgaaagcctttgatttttacctgcactttctgctttttgcccagcagtaaagcaaatgccaaaatcatggacagcagatagcctgcaacggtagctaccgcagcgccgcggattcccatagccgggaaaataccaatcccaaaaatcagaatggggtcaaacacgaagttgacgaccacgcccgcgatctggaaccacatgggagcgaccatgttcccggtggcctgtatcatcttctggatggcgatatgcaccatattgggaatttgcatgaaggagcacacactcatataggcgatgctcagctgataaatttcttcattattggtgaatgcccgaaaatagggtttcataatcagtaatgccagaagattgagcaaagcaccaattccaaaggccagtaacaatccatgtgtgacagttgcatttgcctcatcctgctttttctgtccaagataccctgctatcagcacattcacgccgacaccgatccagatagacgctgcattcatcagtgttgtaatgggaaacgacagggaaaccgccgtcaaagcattttcactcagccgcgctacaaacgcgctgtctatcagattataggaatattgcaggaacatggaaatcagcggcggtatcgacatttgccagatgagctttccaacaggagcgaccgccattttattattggtctgcatactttccctcctctccacaaagcgtccggcgcaaaaaattgcgccggacagcaggatcattaaatccgaacgatatagttttgtttgcgtgctgcgggttgactggcttcccgggctggataccccaatgcaaccgccccgacaccgcgcaaggtttccggcagcttccactcccgcaggagagccttgccactttcactgtcaaaaatctcacgttcccgatgtacccatacagttcccagtccaagggcatgggcggcgagcatcatgttttcgaggacgcagcttccgtcctccacaaaggtacttgcggagccatctgccaaaactaggatcacgacaggtgcgccataataagggtctgtgttgctccccatcacttctgcgtttagttttgcaatctcccgcctatatttggggtctgtaattgcaatgatggttggagattgatgtcctccgccggtaggagcgtaagtccctgcttccagtacagcgt

SEQ ID NO: 4493 - DNA, 2630 bp, Unknown
  16S sequences of unknown bacteria
gccgccgtttttgcaatcccgcacccatttcctccgttcctaagactctcatcggaaatgcgcgccggttattttttcttttccgcttcgatcattccatgcaggcagtccagcgcatcaccaaggctgccgatccggtcaatcaggcccagttccacggcttcgctgccatagagaatgctgccggtgtcggaagccagttcatccgtattcagcatcagcgccttgaatttctcttcggcaatgctggagtttttgcccacaaaacgaataatacgctcctgaatccgctcaaaatagtggaaagtctggggtgcagcaatcaccgttccggtcatgcgcacgggatggatcgtcatggatgccgacggcacaatcatcgacacccgggccgacaccgccagcggcacgccgatggagtgtcccccgcccagcaccaaagataccgtgggctttttcatgccggcgatcagttcggcaatcgcgaggccggcctcaatgtcgccgcccaccgtattaagcaaaatcaggattccatcgatgtcttcagcctcttccatagaggccagcaacggcaaaacatgctcgtactttgtcgctttggtattctccggaagtacctgatgcccttcaatctgaccaatgatggtcaggatatacactgtaccccggctgcttttcaccgtagccgcaccgaaatccaccatctgctgacgctcttccttttcattttccttctgttcggcacttgcggccgttgctttggtttgattcatatccttccgcgcctcctctggtctatttttcgcccggggcgggtaaaatatgacggagccgtaccgcaaattttttccatgcgccggcagcccctgcaataccggaagcgcatttctccgcttgtcaaacggtgcgctttatgatattatgatatagtaaagaagcaattttgaatcaaggaggtgtcggccatggagaagcggggcaccaaaactgccgcggtcaatcgcaaagcgaaccatgattatttcatcgaagcgcgctatgaagccggcatcgagttgtgcggcacagaggtcaaatccatccgtcagggtgcattaaacctgaaagacgcatactgttcggtcaaagacggcgagctgtacgtctacggcatgcacatcagcccctatgagcacggcaatatcttcaaccgcgatcccatccgtccccggcggctgctgatgcaccggcgtgaaatcaggaaactttacggcacagtgaagcaggacgggctggcattgatccccctttcggtttattttaaacattcccgggtcaaagtcgaggtcggcctgtgccgcggcaaaaagctttacgacaagcgcgaaagcgccgcccggcgcgacgcaagccgcgaaatggaccgcgtcatcaaatcgcgtaaccgctgaacggcgaccctctgccgtccggtgtgccgcgcacggccgcagcatattttttataaacagagaattccggaatacagaatatttttcagatttggaggaattttatcatggctcaaaatcccattgtcaccatcgaaatggaagacggcggcgtcatcaaagcagagctgtaccccaccgtcgcgcccaacacagtcaataactttatttccctcacgaaaaagggcttttacgatggcaccattttccaccgcgtgattcccggcttcatgatccagggcggcgatcccgaaggcagcggcatgggtggccccggctacggcatcaagggcgagttccgcgccaacgggttcaataatgaactgcagcacaccaaaggcgtgctgtccatggcccgcgcgcaaagccccaacagcgccggcagccagttctttattatggtggccgatgcccctcatctggacgggcagtatgcctccttcggcatggtgatcgaagggcaggatgtggccgaccgcattgtaaacgtcaagcgcaattggtcggataaacccaaggagccccaggtgatgaaaaaggtcaccgtggaaacctttggcgtggactatcccgaaccggaaaaagtttaagtttttgcagcatatctctccagcggatgcgccccgcgcgcatccgccagatccgggggtgtaccggtttcgacgggggtattgatatgcggtaagcgggcggtggcgcctggccaccataaaacgggcaccttaaaattaaaggacaactctactgagcttgtcgctgcctaagtaaaggcagccgtctgacccggaaggaccgcggtccgggatttcaggcgtcgatcagcggtgaacatgagtgcgctaagctttgcgcgcaccatgcacaatgaagctactgaacctgcaggtttggcctttcacctgcaggggagggaatgacaaagaatggcctgcgcccggagaaagccgcacggatgtgctttcggacaggggttcgactcccctcacctccaccaaatccgctatctgttgcatcgcaacggatagcggatttttctttgtattgaaacgctttttcgttgtttgacgataggaaatatttttagattcatatcgcttggttgcaatagaaataccacttttttgaccaaattgcaaccaagattgcaacccaaaaaag

SEQ ID NO: 4494 - DNA, 21186 bp, Unknown
  16S sequences of unknown bacteria
atattttcctacatagaggcttttttgtgctgtccgcacaatcgggggcagttcaaaatcctgcggcttttgtgctgttcttgttaatcttcggtataaatcaggggcatacgccgtttgtgctcggtgacccggtgggcccgctggatgatctggtcgtgatcgttgccgcaggaaccggtggccatgtaggattcgatttcgtcataggtgacgcccatctcatcctcatcggtctggccttcaaacagcccggcggagggagcttttttgatgatgttttccggggccttcagataggccagaaattcgtagatctcggtgaccgtcaggtcggaaatggggttgaagtcgcaggcgccatcgccccatttggtgaagtagcccatgtaccgctcgcatttgttgccggtgcctgccaccaaagcgccccgggtctgggcaatggcatacagagtggtcatccgcaagcggggagcgatgttgcccagggagggctggctcagtgtttccaccccttcgatctggcggcagatggcctgcttcacttcggtgaggtccactgtcaccgtctcgatatggaactgctcggccacggccagagcatccaccatgtcctcgccgaaattccgggaggactggcagggcatggctacgcccagtgtgttttcacaggccagtttgcacagaatgcccaccagggcgctgtccttgccgccgctgttgccatagacgataccctggcaatgggcgtccttcagggcaaattggataaaggccactcgctttttcagttcttgtgcgtaatctctcatgtgactccgtcctttttagagccttctccggccgaagccggagaaggcagctttgtatcagatctcaatggttccttcaaagacccgctgggccttgccggtcataaagaccgcctgaggagtatagcggatcatcagctcgccgcccaacagcttgacggtgatgtccttgttttccagacagtggccccgcagtacgctggctaccgccgcagcgcaggcaccggtgccgcaggcgaaggtttcaccgctgccccgttcccacacccgcatctggatggtggtgcggtccagcacccggacaaactcggtgttgactccctgggggaagagaggatggtgttcaaagaggggaccgatctccgagagggggagattgtccagattgtcgcagaacaccacgcagtggggattgcccatggacaggcaggtgacttcatactctttgtcacccacggtgatggtgcggcccacagcgtccacacccggcagattcaccgggatctggtcaggattcaggatggccttgcccatgtccaccgtcaccgaagtgaccgtgccgctttgcacatacaggtgaagggtgcggatgccgctgagggtttcaatggtcatgtcctgctttttcacaatgccttcttcatacaggtatttgcccacgcagcggatggcgttgccgcacatttttccttcgctgccgtctaggttgaacatccgcatctgggcgtcggctttctgagaggggcagatgagcaccacgccgtcgccgccgatgccgaagtgccggtcggaaaggagcacggccaggctttccggacttcccacctgctggtcaaagcagttgaaatagatatagtcattgcccgccccctgcatcttggtgaagcggaggggaatacgctctttgcgcatatgattcagatccacaaggccggtgttgtgctggccatagcagctgcgcaggctgtcggccagggcagaagccgtgtccatggaggtgaggcagggaatgcccagctccaccgctttccggcggatcttcacgctgtccagccagggcaggcggcccttggaggaggtggagaggatataactgatccggccgctttccaaaagtgttgcggtgttttcatccgattcgtggatcttgctcaccacatgggcggaaagtccggcttcttccagcacccgggctgtgccctgggtggcatagagctcaaagcccagggaatcaaacttccgggccagggcggccacttcgtgcttgtcggtgtcgcacactgtcagcagcacgccgccggtgcgttccatccggtaaccggcgccgatcaggcctttgtacaaggcctcttccagggtcttgccaatgcccagcacttcgccggtggacttcatttccggccccagctgcacatccacatcggtgagcttttcaaagctgaacaccggcaccttcaccgccacatagggaggcgggggatacaggcctgtgccatagcccatgtcgctgagcttttcgcccagcatggcccgggtggccagatccaccatgggcacgccggtgaccttgctgatataggggatggtacgggaggagcggggattgacctcgatgacatagatctccccttcgtggatcagatattggatgttcaccagaccacgggtgttcatggacagagccagatcccgggtgtaggagatgatcttttccacttgcaggccattcagattccaggcggggtagacggcgatggagtcgccggagtgcacaccggcccgctcgatgtgttccatgatgccggggatgagcacatcctcaccatcgcagatggcgtccacttccagctcgatacccataaggtatttgtcgatgagcaccgggttttcgatcttgtgggacaggatgatgcccatgtattcttcgatgtcctcgtcactgaaggcgatgatcatattctgtccacccagcacataggaaggccgcatgagcaccggatagcccaggctgcgggcggcgttcaaggcttcctcttttgtcatcaccgtcagccccttgggacggctgatgtggagtttttccagcaatgcgtcaaaccgctcccggtcctccgccatatcgatgctgtccgccggggtacccaggatgcgcacgccctggctttccaggaagttggtcagtttgatggcggtctggccgccgaaggctactaccacgcccaccggtttttcggtttcgatgatgttcatcacatcttccggggtgagaggctcaaaatacagccggtcaccggtgtcaaagtcggtggacaccgtttccgggttgttgttgacgatgaccacatcatagccggcttttttcagggagcggacacagtggaccgacgcatagtcaaactcgatgccctggccgatgcggatggggccggaaccgaagacaatcaccgtctccttgccgctctggtgttctgcaatgaattcggctgcttcgttttcctcatcgtagcaggagtagaaatagggggtctcggcatcaaactcggcgccgcaggtgtccaccatcttgaaggaggccgacagatggcagggcagttcggagccggagatgctctccagcactttgtccgggaagcccagacgcttgccctcccggtactgttcctctgcgagggaagtgccgcagatggcgttttcataccgggcgatgttctggagtttatgcaaaaaccacaggtcgattttggtgatgtcgtggatttcctggggagcgaaatcccgcttcagggcttcatagacgacaaacagacgctcgtcgtcgcacacattgatctgggcccgcagttcctcgtcggtgagcttttgcagtttgggcagggtcaggctggaaaggccgatctctgcgccccgcaccgccttgtggatagcgctttcgaaattctgggcaatggccatcacttcgccggtggccttcatctgggtgcccagcagacgcttggcatagacgaacttgtcaaagggccatttgggaagcttgacggccacatagtccagtgtgggttcaaagcaggcacaggtcttgccggtgacggcgtttgtgatttcgtccagggtgtagccgatggcgatgagggcggccactttggcaatgggatagccggtggccttggaggccagggcggaggagcgggacacgcggggattgacttcgatgacggcatattcaaagctgtccggattcagggcgaactggcagttgcagccgccttcgatgcccatggcggtgatgatgctgagggccgccgaacggagcatctggtactctttgtcggaaagggtcactgccggggcgatgacgatgctgtcgccggtgtgaacgcccaccggatcgaagttttccatggagcagacggtgattacattgcccttgctgtcccgcatcacttcaaactcgatttctttccatccggagatgcacttttcaatgagcacctgggtgatgggggacagacgcaggccggtggcggcgatatgccgcagttcctcttcgttctgggcgatgccgccgccgctgccgcccagggtaaaggcggggcggacgatgacaggatagccgatctccttggcaaaagacaaagcgcctgtcagatcggtgaccaccttggaggggatcaccggctggccgatgctctccatggtgtctttgaacacctgccggtcttcggccttgtcgatggtctccggattggcgcccagcagctttacattgtgctctgccaggaaaccgtctttggccagttccatggacaggttcaggccggtctgtccgcccagggtggacagaaggctgtcgggtttttctttttcaatgatccgtttgacggtgtccagggtcagcggttcgatgtagatctcgtcggccatgacgccgtcggtcatgatggtggccgggttggagttgatgagcatgacctccagcccttcttccttcaaggcccggcaagcctgggtgccggcgtagtcaaactcggcggcctggccgatgacaatggggcccgagccgatgaccagcacttttttgatatcgggatttctgggcattatcgcatctcctccatccgtttgataaattggtcaaagagaaattgggtatccagagggccgccgcaggcttccggatggaactggacggtgaacaccggggcgttttcatagacgatgccttcacaggtgccgtcgttggcattgaccatgctcacctgagcatgagagggcagagcgtcgctgtccacagcatagccgtggttctggctggtgatataaacccggccggtggaaatgtcccgcaccggctggtttgcaccccggtggccgtatttcagcttgacggttttgccgccctgggacagggccagcagctgatgccccaggcagatgccgaaaatgggcacgcccgattgatagagtttgccgatctcatggatgatctgggtattttccgccgggtcaccagggccgttggagagcatgatgccgtcgggagaataggaaagcacttcctccgccggggtgtgggccgggagggtgagaacctcgcagcctctcttcaccaggctgcggcggatgttctccttggcgccgaagtccatgagcaccacccggaaccggggctcctccggggcatcggtgcgggggctttggcaggtgacgctttccactgcattctggatggtgtatccccgcagttcctccagaataccgggaaggtcggagatgtcctgggtgatcttgccgttcattacgccctgacggcgaatcagcttggtcagccggcgggtgtcgatgccgtagatgccgggaataccgcttttctgcaaaaaggcatccagatcgccctggcagcggaagttggagggctcgcggcaccattcccgcacgatataacccttgacctgcactttgctgctttcaaaatccgggggaattaccccgtaatttcccaccaggggaaaggtctgtaccacgatctggccgtaatagctgggatcggtgagagtctccagataaccggtcatgccggtggtgaacacggtttctccgcaggtgctgcccacggcgccgaaggccttgccctccatcaccgtgccgtcctgaagaaccagataggctttttgatccatataaattccctccttttccgattattcaaattggtttttatgatgatcctgtcccacatcaatgggatattcgccggagaagcagccggtgcagaagcgggcccggctggtgtggcaggcctctttcaggcctttgatgctgatatagcccaggctgtcggcgccgatgtgctggcagatctccgggatggacattttgttggcaatcaggttttcctcgctgtcaatgtcggtgccgaaatggcaggaatgggtgaaggggggagcggaaatgcgcatgtgcacttccttggccccggcctgcttgagcatccgcacgattttggcactggtggtgccacggacgatggagtcgtccacgagaacaatgcgcttgccttccagattggcccgcaccgggttgagcttcagccgcacggcggcatcccgctgggactgggaggggaagatgaagctgcggccgatataccggtttttcacaaagcaggggatatagggcaggccgctttccttggaataacccatggcggcttccagaccgctgtcaggcacgccgcataccagatcggcttccaccggatattcccgggccagctggatacccatgttgtaccgggcttcgtaaacgctcaggccgtcgatcaccgagtcggggcgggcaaagtacacatattcaaaaatgcacaggcccttgttgtctttttccaggatctcgcaggccgttaggttgccgttggggtcgatgatcaccatttcacccggttcgatatcccggatgaagcggaagccggcgctgtccagagcgcagctttccgaagcaatggcatggccatggtcattttggcccagacacagaggacggaaaccccagccgtcccgcacggcgatcatggtgccgtccgaagagaggacaatcaaagaaaaagctcctcgcagctgacgggccgctgcggtcacggccacctggaggttgccattgcggatgatctcataggcgatcaaagccgaaatgacctcgctgtccgaggtagcggaaaaggcgcagccgtactgggagaggagctctttcagttcaccggcgttgacgatgttgccgttgtgggcgatggcgatgcggccccgaaggaattcggtgaccaccggctgtacattggcacagatattgccgccggtggtggaatagcgcacatggccgatgccgatgccggaggcgggcagcttcttcaaagtgtcgccattgaacacttcgctgacaagccccacatctttgtggcacaaaatggcgtttttggaaagcacggcgatgccggctccttcctggccccggtgctgcaaagccgacagggcgttgtaagtgatgccggcggcttcctgggtgttgatgtgcaccccgaatacgccgcattcttcgtgtaatttctctcccagcattggtgatcctccatcatttggaataaacagactctttgaaaagccggccctttggaaaaagggccggacaggagccgggccccggtaaaatgttccggggcccgaatcgggcaggcggcaaagccgcatttttacataaccaggtactgatcccgctcggcccctacagaaacataggtgatgcggcagcccacggccttctccagatagtggatataatccagggcagccttgggcagatcctgcacacggcggcagcgggaaatgtcgcacttccagccaggcaggtagtcatagatgggcttggcgttttccagatcctcgccggtggggaagttgtcggtgcgcttgtcgcccacctgatagcccacgcacacggggatcttgtccagataggacagcacatccagcttggtcaaggcgatctcatcggcgccctgcatccgcacgccatagcgggaggccacgcagtcaaagggacctacccgacggggccggcctgtggcagcgccgtattcaccgccggcttcccgcagacggtcggcttcttcgccgaacagctccactgtgaaggggccttcgcccacacaggaggaataggccttcataatgccgatgctcttgctcagcttgtggttggggatacctgcgccgatgggggcgtaggcggcgatggtggaagaagaagaggtgtagggatagatgccgaagtcgatgtcccgcaaagcgcccagctgagcctcaaacaggatcttcttgccggccttttccgcctgatccaggtagacgctggtgtcgcagacgaattccttcagaggatcgccgtaggtgcgcagccaattcatcacgctctccacggtgatgggttcggcgtgatagcctccttccaccagcaggtttttccattccacagcgcttgccagccgcttttccatggcggcgggatggagcagatcgcccatgcgcagcgcccgcttcatgtacttgtccccatagaccggagcaatgccccggcgggtggagccgaacttggcgtcgcccagccggtcctcttccaggttgtccagcattttgtgataaggcaggcagatgacagccttgtcgctgatcttcaggtttttgggggagacaggcaccccggcgtcctggagatttttgatttcgcccatcagatgctccaggtcgatgaccatgccgttgcccatcacattgaccacttccggccgcaggatgcccgaaggcagcaggttcaaaatgaatttgcccaggggattgaccacggtgtggccggcgttgttgcccccttgatagcggacgacgatatcatagttttccgacaaaaggtccaccatgcggcccttgccctcatcgccccagttgatgccggtgatcgcagtaagcataacagtttcctcccgatattccgaaatgatctggctgcaaaaagcaggcgtccattaaaggacaaaagcactcttcttttcccctttaatgaacgcctttgttcattttataaattatatagtaggctaaagtacccgtcaagggattttgctttttttcccagatattccatggacttttgtcactttgcagcgctgcaaagaagaaagatggaggaaaaaagcagattgaccagaggggaagagaattgcggggagaggaagaggctggtatactgaaaaataaacagacgcctgcgggcgagagaggacggatgcagggtgtatacattgattttcaacggttctccccggagagcaggggacaccagcgcattgatacaggccttttgccgggaaatccagggacaggtggaacagatcgacgcttatagatcgactctgtccccctgtgtggactgccgctgctgcgccggaggcggaggatgtgtcataaacgacggaatgcaggagatttacgagaaggtggaaaaggcccaggtgctggtgttggcctctcctctttatttttctaccctcaccggtccgctgcttgctctgtgcagccggttccaggctctgtatatggcccggcgaaaccagggaagcggatgggaacagaccaaaggcggactggtgctgctcacaggaggcggcagcaccaaagatccttcctgtgcttttcgtacttcccggatcatcctgcgggagatgggggccggggagatccgtcaggtggccagcatcggcaccgaccgccttcccgccggagaggatgaggaggctctccggcaggctgtggcggcggcccgggagtttaacactctgtttgcatagcggccgggaaagaatcaggcagtgagggcgccgttttctccggtgagaagcagcaggatgttttcctcttctcctgtctgggtgttgagatagaccagacactctgccccatcgggggtagagcagagaaattcgtagcaatccatctccttggctcccgctgaagggatgatggcctggccccggcgctctacggtgagcagaggggagagcagggtttcggcttcctcaatggacaggccggaaggggtgaattcccgcacccggtggttcatcacataccctcggctttcaaaacccaggatgctgccattgtccaaggccaccgttactttaatcaggtcggggtaaagcagccgtccttcttccaccggcgcaaagtttaccgtcacagttccttggtttgtctcataatagctgcggcacatattggcatagccccggctgcggagaaattcctgggcgatctccgctcctttctggggggacagggtggggctggtgagctcccgaccatcggtgagcagcagagcccggccgccttgctttgtcagcagcaaggagatgttttccccttccagacggtaacaggggatgtctccttcggtttctccggtgacagtgagggcatcctgggaaaggccgcagaaggctgcgccctgggtgagagcttcttccggggacagggtgggcaaagactggagggccagcggctccagctgatccagatgatcggagaaggggccatcataggtgagggaggggtagtccgcctgttccggggtatcggtgtcaaagtccccggcggatacggcttgctggggaaaatgcaggttttcccccagggcggcctgggtggacagaagctccagggagagccggtcggcggcctggtgaagatcggagagggtgtcatattcctgctctgtcagggaaaccttccggccaatgagggtgtaggcatattctcccgtctggttgatgaatttctgcacctgctgcagcccttctgtttccggaggcagggaagagagggcctgggaagccgaggcggcttcccgccagatctgggccgacatctgggagagcatggaagcggtgccggagcagcgggccttctgcaaggcggtctccagagaggaaacgctgctcaccagctgggaataggcctgctgacgcagctgcacctcacggcgctgggcctgctcccagcggaagcggaagaaaaaagcggcagtcagagaaagaaggctgacacaaagcaaaaagctgatcagacgcttttgggggacggtctcatacatgacaataagctcccttcacggcagattcaaaaaagatactggaaagatggttttatcttttgtaaaaatgggggaattatcccggtaaaatccccaaagctcttgtcccaaaggaccccatgtgttaaaatcactttatatgcctgtgggacatttccccaaggaggaaaggaaaaatggagtttcattttttggatagatttcagcacatggctccgccggccggcggcgatgtgctgaaaatggcatcggcccccggggtgatccccttttcggcgggcaatccttcggcggagaccttcccgctgaaggaaatggaactggtgacaaaggatctgtttgcgcaaaagggagcggcagccttgtttcagtatggagtcagcgagggctatggccctctgcgggagttcctccaaaaccggatgaaaagcaaacacggcacaggccgggagtctgaccggttgatgatcaccagcggcggacagcaggtcatcgatctgttcactcgtctgatggtgaatccgggggatgctgtgatcgtggaagagcccaccttcatgggggcgctgaacaccttccggtcggccggggcccgcattgtgccggtgcccatggagcaggacggcatggatctgaaccggctggaacaagtgctgcaagaagaaaagcagataaagttcatctatgtgatcaccaccttccagaatcccaccggtttttccaccaccatggaaaagcgccgggccatctaccaactggctcagaaatacgatgtgatgattctggaggacaacccctattttgaactgcggatcagcggggaatacctgccgcctctcaaaagtctggatgaagaaggccgggtcatttttgcagggtctctttccaagatcctgtctcccggcgtgcgtctgggttatgcccaggcccatgaagatgtgatcgcccgtatgacggcgctgaagcaggccggggatgtccattccaatctgtttttccaggcggtggcggcggagtatttcgcccggtacgatctggacgcccacattgccgcctgcacggctctttataaggaaaagcgggaccggatgctgtcgctgctggaaaagaatcttccggaaggggtcacattctcccgtccggagggaggtttgtttgtctggcttcagctgccggaagggctggatgggtcggcattggcggctcgctgcgcccagaacaaggtggccgtggtgccgggcgctgctttcctggccgatggcacacaggtttcggccggtgtccggctgaactactccacccccagccatgagcagatcgatgagggcgtggaaatactggccagatgcgtcagagagatcatgggttaggatgtgaaaaaatgatggaagaaaaaatagaacaaaaacaggaaaccgaagcacaacaggctccccggcccaaaacggtgttcagcggcgtacagccttcgggtaagctgaccttgggcaattacctgggggccatgggtaactgggtggctttgcaggaggagaaccggtgcatcttcagcgtggtggatctccattccatcaccgtgcgccaggaaccggcggctctccgccgtcagacgctggaagtgctggcccagtatatcgcctgcggcatcgatccggaaaaaagcctgctgtttatccagagccatgtgtcggcccatgccgagctttcctgggtgctcaactgctataccatgttcggcgaattgtcccgcatgacgcaattcaaggataaatccaaaacccatgccgataatgtgaatgcaggactgtttacctatccggtgctgatggcctccgacattctgctgtaccagaccgattttgtaccggtgggtcaggatcagaagcagcatgtggagatcgcccgggatattgccgagcgcttcaacggcatttacggcaatgtgttcactgtgcccgagccccgcattgcgggaacgggcgccagaatcatgtccctggccgatcctacaaagaagatgagcaaatcggacaaaaaccaaaacgcctttgtgcttctgatggacaagcccgaggacattatgcggaaattcaagcgggccgtcaccgattccggcagtgaagtgcgccggggtgagggcaagcacggggtgaacaacctgatcgccatttacagcgcggccgcaggctgcacgccggaggagaccgaagagcgctttgccggcaagggctatggcgacttcaaaaaagcggtgggcgaagcggtggtggaagtgctgcgtccggtgcgggaaaagacagaagatcttctgaacaacaaggattatctggaaaaggtttatacccagggcgcagagaatgcatcccgcattgcccggcgtaccctggagaaggtctataaaaaagtcgggtttatcaagaaacccttctgatgggagctttgaatagaaatgatagacaatagtgttttgatcacatccttttttgccttcagtgtggctctggccatctcttttgccatgacgcccattgtcaagctgttcgccaaaaaggtgggggccatcgatgtgcccaaagacgcccggcggatgcacaaagtgcccattccccggctgggaggcctggccattttcctgggcttcctcatcagtattctgctgtttggccgtatcgatccccagatgaaatccattttgctgggtgcggtgttcatcgtcatgctgggtgtggtggatgatatccaccccctcaaaccgctggtgaaattcgccggtcagatcgtggcggctctgatcccggtactgtccggtgttgtggtgcagcggctgatgaatccctttggcgacgggaagtattttgaactggggcttctggctgtgcctctgacggtgatctggattgtgggcgtcaccaacgccgtcaacatgatcgacggtctggacggtctggccgtgggtgtttccaccattgccaccgtgacggtgtttaccattgccgtgctggtcagcgaaagctatatcgccgtgaccatggctgccctggccggcgcctgcatgggctttatgccctataacatgaatcccgccaagatcttcatgggggacaccggctccatgttcctggggtatttgctggctaccatttccatccagggtttgttcaagttttatgtgggcatttcttttgccgtgccctttatcatcctgggcctgcccatcttcgataccgcttttgccatcatccgccggctgctgaagggccagagccccatgcacgccgaccggggccatgtgcatcaccggctcatcgatatgggctttgaccagaagcagtcggttgccattttgtatatgctttcggtggtgctgggcctgtccgccgtggtgctggccaccagtggcgaggtgaagatcatcatcctggccgtggccattctggcttcggtgctcatcggtctgagcgtcaccggccacgatcagaaaatggaaaaagagcatcaggaagaaaagcaggatgaggggacggaagaggccccgggaagcgaggaaaagcatggataagatcaaagtgatgtcggttttcggcacccggccggaagccatcaaaatggcgcctctggtgaaggaactggagagccgggaagaagtggagagcatcgtctgcgtcacggcccagcaccgggaaatgctggatcaggtgctggaggctttccagatcaccccggactacgatctggacatcatggagccttcccagactttgatgcgcatcaccgtcaaggccctcaccggcctgggggatgtgctggaaaaggccaagcccgatctggtgctggtccacggcgatacttccactacctttgtggcagctctggcttctttctatgccaaggtgaaggtgggccatgtggaagcggggctgcgcacctttgacaaatactcccccttcccggaggagatgaaccggaccctgaccaccgatattgccgatctgcattttgctcccaccaaggccaatgtggcaaacctccatcgggagggtgtggagaagaatgtctatatcaccggcaacaccgttatcgatgctctgaaaaccacagtgcgggacaattacaccttccagtgccagcggctcaatgagatcgattatcagaaggaacgggtggtgctgctcaccgctcatcgccgggagaactacggcgagcccttccagaacatcatggacgctgtgcgcatggtggccgaaaaggaaccggatgtgcgttttgtctatccggtgcatctcagcccctatgtgcagcagatggcccgggacaacctgggggatgttcccaatgtggacctggtggagcctttgggcgtgatggatatgcacaacctgatggagcgggccaccctggtaatgaccgattccggcggcattcaggaggaagctccttctctgggcaagccggtgctggtgctgcgccgggaaaccgagcggccggaggccgtggaagccggtacagtgcgcatggccggtgtggaagccaaagaaatcgcagagaaagcattgaaattgctgaacgatccggaagaatacggcaaaatggcccgggcggtcaatccctatggagacggtgaggcctgccgccgcattgccgatgcgattttgtatgcctttggaaaaacggagcagccccccgaggactttacaccgggcaccgaggaataagggagacccatgaaaaaggggaaaatggctcaggcggtggcggccgtcaccgcgttgctgctggtggcggtgctcatcagcttctatctctccatggtggagatggaaccggcggggacgattacccttccttcctcccagggctccatttctgccgattcggataaattgggggaaaatgggccgttggtggatggagtgcaggtggatgcatccaatgttctgaatgtcattgctgcgctgcaccggccgaaggaatacacctatgagctggagagtaccctttcctatcacagtgcagaggatgtgctgcggatcaaaggggctgtgcaaggccgccgcagtcatatccagcagctttcggaaagcggagccgtggaaaaggagatcatcattgctccttccggctactatgcctggcgcagcgggcaggtcaatccctatgtggggacgctggggcagggcatttcccaggatggggaactcaccgccttctatgacgatgccagccgggtacctacctatgaagcagtgctggagctggacccgtctcagattctggaggccgggtatgtggaacagggtggggaagcctgtatttatgtgaaggtggaaaatcccctggccggcacccaggacagctattatatcgccgtttccaatggccttttgcatcgggcggaaagcgagaaggagggaatgaccacctattccatgaaactgacccgggtgacggtggaagatgtgcctgaaagccggttccagctgcccaatggccagatggtggaagaggaataaaactctttttggtgcttttgcaaggcccggtttgcgggtaaagaatgttctgtatgtacggccccggcaatgccgccggggctgcttttgagccaaatcgtttcaggagaacagtataactttatgacaaatgatatgacaaaaggcagccccatgcggctgctgctggccttttccattcctctctttatcgggaatgtgtttcagcaattttacagcacggccgatacggtgatcgtgggacgcaccatcggcgtgcaggctctggcggcggtgggggccaccggtgccatctcctttctgatcctgggctttgcccagggcctgaccagcggcttttcggtgatggccgcccagtgtttcggcgctggagaggaggaacggctgcgggacagcgtggccacttccattttgctgtgcgtgggaagcacgctggtcatcactcttttggcggtggtcaccgcccggccgctgctggaagtgatgaacacccctggggatatcatcgacgatgcctggcggtatattgtggtgatctattacggtattggcgccgccattttttataatatgatctccggcattatccgggcggtgggagacagccgcacgccgctgtatttcctcattatcgcctgcattatcaacatcattctggactatgcctttatcgcctttttcggcatgggcgtggccggggccggttgggccaccgtcattgctcagcttctggccggtctgttgtgccttttttatgtgaagctccggttccctgtgctgcacctgaagaagcggaattggcattgggataagggctttgcctggcagcatctgcgggtagggttgcccatggcttttcagttttccatcacagcggtgggagttattgtgctgcaaacagccctcaatggctttggatccacggcggtggcggggtttaccgctgctaccaagatcgagaacctggccacccaggcgttggtgactctgggggcggccatggctacctatgctgcgcagaattatggcgcagggcagccccggcggattcgtcagggcgtgcgggccagtgggaaactggctctggtgttcagtctggtgggcggggccttggtgatctttttctgcaaggggctggtgagcctgttcctgggagaaaatgacagagctgtgacggcctatgcacagacctatctgaacatcgtggggccgttcttcttcattctggggctgctgtttattttccgcaacactttgcagggaatggggttcggaggcattcctctgctggccggtgtcagcgaattggtggtccgtgtggcggcggccatgtggctggccgatgcctggggattcagcggcgtatgtgcggcaagctccattgcatgggtgctggccaccgctcttttgctgggaggctatattgtcattttgaataaagtggagcgatacccggcccaatatggccgtgtgtctgcaaacaaggaggaagagaaatgaacctgcgggaataccggtcggaggactgtccccggctgatggagctgttttgggactcggtgcatggggcggcttgccgggattataccccggcccagctggacgcctgggctccccgggaaatggacgaagagcgctggggcagaatcttttcccaccaccgcacctttgtggtggaggaaggggaaaaaatctggggatttgccaccctggacggggattatttcgatcatctttttgtcagcagcacggctcaaaggcggggcgtggccacggccctggccgatcgggtggagcagaccgccaaggaacagggcttttcccgcatttcggtgcacgcttctctcacagcccggcctttttttgagaaacggggttatcggatgctgaaacagcagcaggtggagcgccggggccagcggctgaccaactttgtgatggaaaaggctctgtaaaccaaaaggccctcgaaagggccttttttcacactgtcaagaaatttatgcagcaaaaaactatctgtcctacccctcatcaatctgtaaaaaacggcgacctgtgcgtcggtttttacacctctcaaggggcaagtgtgcgccaaaggcgtgcacgcagacccttgcagaaactcgaaaaagaggtttcaaccactttttcgatattctaaaaaaggcccccaaagggccttttttcatcaaaatcccagcaagagcaatgcgcctacaatgagcaaggtgtcggccagattggatttttcaccgttttcatcggtatcggccagcaaaaaatagaccaataccaagagtaaaatggtgtcgctgtccagttccggcagcttgagacgctggcccagactgcccagtagaccgcttttgcgagggggctgattttccggacgggcctggggctcggaagcggaggaagggggaggcgggggaatttgggctgcctgggggaagaaggcttcaaagccatctccttgaaaatagcggtcatacatgggctcatctcctttgcagcccgcccagggcctcctgggctgcccgggccagattagccatttttaccgcccggtcgatattcggcgcccggcgctgtcccagataaggcttgagggcccgcagcaaattgaccttttccggcttgagataattgacatctccggaaaaagccatcatcagccggggaagcagggccgggtccattccgctttgcttttcggtggtttcttcggcagaggaagaggagccctttccaaacagggagaacaatgaagaaagatccagcccgccctctttcttttgctcattctcagcaggcgtagaggaaagaccctttcccaaagaggccagaagggaagagatgtccccgctgttttgttctccggatggaggtgggtttgtttgttccggagagacgaacaagcctcccagccctccggaggcaggaggcgggttttgagaagcgacagattcctgcagcgccggagccaggccggcggccagatcggtgacttttttcatgctttccggatcggaaaacagcttctgtaaggtatcctggatgtcggccattggttccgtcctttctccgcggtttcaggaaagggcccaggcggccggcgcggaaggccgcctgggagcaaaaagtcagcggcccaccacttcgatgattttggcggccagctgtgccccttccgggctggaaagcaaagtggaaagcagcacacgggcctgatcctgatcgccgctggccgcagcggctgcggcgtttttgatggcgtcgcctccgtcgctggccagcatggcaatgagctgccggccgctttcggtgctcaccacactgttgagcttatccagactcttcacgattttggccccctggggactggccatgaggaccttggcaagattttcgtaatcgttttgcatgatgtatctcctcccatgggcttttcaacacagtatatgcggaaaaaaactgtccggttccgaaaaaacgaaaaaatttccgctgccccctttcttttttcatgcaagtgatgtattctaaaagccaagatcaaacaaaatggaaaagaggaggggatgggatgaagctgtgcgtagcttccgattcccatgggaattttgatgcgctgtgccggatgctgaaaaaagaaaacccccattgtctgctttttttaggcgatggcgtgcgggatgcagaggatgccggaatgttgttcggctgccaggtgctggcggtggcgggcaactgtgatctgatgtgccaggagcccttgaccagaacgcctcagccggagggagtgcggctttttctcagccatggccatcgttttggcgtcaaggatgggttggatgaatttctgcgggcggcccagcaggccggtgcccaggcagcttttttcggtcatacccatcagccggtagcgcttacgaagtggccggttcctttgtataatccgggaagtattggctatgaaggcacatatctgcgcctggagatcgaccagggccaattttcctgtagtttagaaaggatcgataaggatgtataaacagattttgcaaggcttccaccgcaaggcggtgcccttttccctgtgggtaggtttttttctgctgatgatcagcttttatgaggccatttggcagactccctacgccacgccggtgcattttctcattccggcgctgctgttttgtctggttacggtggtgatctgcggctattcttttatatcttatgaataccggctgatgcacgatcacctgtttatccgtctccagctgatgggacatcccataaaggccaaggtcattgcgctggggaacccggaatgtattttggtggagggctgctccattggcagtacactggggagaggcaaacagcattattatctgcctctcattggtcgggatcggtgctgtatgcttcgttaccgggacaagggcgtactgcggtatttggtgtttcggccttgctctgtgctggtggatatgatccgccttcagctggaaagcgagcgggccagccggagagaagaggaagaaaaacgggaaaatgaaaaataggctatagatgcaagagcagggagaggaagtatttctgaacaggtccagtaaaaacggacagtgacaaaagaccccctgatgtaggaaaat

SEQ ID NO: 4495 - DNA, 23071 bp, Unknown
  16S sequences of unknown bacteria
gagcgttgcaagccgttaggcgctgcaaggcgaccattgtgaattgtggaacgaagcagcgcggagtaagcccaatgaagcagggagtgccacaagcgagcttgcgagcgcagtgggacgaccatgctgaattgaggggtcgcccctgcggacttcgctccgtgtcttcggggcttcggctctctcgcgctctcccctgggttttttgacggtctatggccgccaggtttttctggcggccatgctttatgggttatggaatgaggttcacgctcgggttttgcggaatctccgtgagcgtaaagtgcatggggtcgcagggctcgctaaaataatagccccaatagaaccccgccggttcaaaggcgatttcgtacagcaaacagtttttcaacgcgtcgggaacggccgcgccgttcgcggggggctcgcccgcgtaatcgaaattgtaaatgcgggtttcccctgtgaaaccttcgcccgcataggaaaggcgcgccatggcgtccgcgatggtttgccggttttcctcgctcatgcggtttacgggcagggcggaattgatgtcgatggccgtgccaaagctgtgcgaggacacgaattccccgcccgcggtaaagcgcggattgtaggccccgtcgcccaggttgtacatcaccagatccatcagcgggcaggagcgcgtttccccggtttggtaggtgatggacacgatggagccgcggatggcgctcatggccgcctcaaaattgggcagcgcctggcggtgtaccgggaaggtcacgccgtatagataagagaaatccacgatgttttcctccacccacgcggggtttacgttcaactcgccatcgatccattcataggggaatagatagctctcgttgccaaagaacgcgtccagcgccgccgcgtcttccacttgttcttttgtcaggtttgtccatgcgtgttccaccacttgaaaggtaacgtcccacacgttcacgctgcccatcgccgtgttgatatcgatggtaaagcgtttttcgccgggcgtgagcaggccgaacatcacctgggaatcaatgttggcgagcggatagcggtattcgctattcaccgtttgcgaaacgaggatctcatcgcccgccgcgtcgcccacgcgcacggtgatttcataaatgggatagcgcgaataaatggtgccggtgagcgcgaaactgtcgccttgatagtgcgtggtcaggcggctgatgccatagagataggcgatggcgtttgggtcgcgcaccaccacaaagcacgaatcgtccgcgctggtaacgttgcctgtgccctgcgccgtgccggtgagcgccgtgcccgaaatggacgcgatcccctccgcgccggatatggcctcgccaaaatcataggtttctcccacaacgatctggatggaatccggcaattccgccagcgcgcccggggcggccagcagcagggccaggatggccaggatcattcgtttcatcatttgtatcacccccatggcattataccatgccagtgtgggcgcgcgcaagtccgcgcgcatggaagcttctggcgcgccttggcagggcaaattttttggcaaagccgcatttccgccattgacaagccgccattcttgcggtatgctagagtgaggaaggatgttgaagcaagcatgaagaaaaacctcaatctgccaaacgcgctcacttttttgcgcatactgatgatcccggctgtttatataacgtattatcagcttcccgaacgccgctggattgcgctggtgatttacctgctagccagtttcacggattttttggatggctatctggcccgcaaatggaaccagatcacttcttttggcaagctctttgatccgctggcggacaagctgatcgttttgacggtgctctattgcctagccgacacggattacgcgccctggtgggtgtttttcctgatgctgggcaaggagatcctgatggtgctcggctcgctgcttatgctgggcaaaaaggtcgtggtcaagagcaatatctatggcaaaaccgccacttgcctgttcattgccgccatcgcgctggtgttcccctggcacaacgtcgcggcgcttttcacggttggccatgtgctgctgtacattgcgctggcggcttcgctggtttctatgggcatatacgcctatcaggccgttaaaattcggccaaacgcttgacggaagggctttcagccgctataataaaattgtatattcgcctgtgagggagaggagtacgcgcgatccggccagcagagagggcggttcaccggctgaaaggccgcctgggatgggatgcgcggaaggtcgctccggagggggcgcggtgaggtttgcttagccgtgccggggttgcgccccttatcgcgcgggaaagacacaagtaaggtggtaccgcggcacgttcgcccttagcgagcgcgccgcttttttgaccgcaagggaggattggacgagcaatgaacatggaaaaaaccttcaaccccaccgctgtggaagaccggctgtataaaatgtgggaggattccggcgcgttcacgcccgagcgcgtgccgggcaaaaagcccttcaccgtgatgatgcccccgcccaacatcacgggccagctgcacatgggccacgccatggacgaggtgcccaccgatattttgatccgctaccaccgcatgaagggcgaccccaccctatggctgccgggcacggatcacgcttccatcgccacggaagtcaaaatcgtcgacgcgctgaaaaaagagggcttgacgaaaaaagacctgggccgcgaagaattcctgcgccgcgcctggcaatggcgcgagcaatatggccgccgcatcgtgagccaacagcgcaagctgggcgcctcctgcgactggacgcgcgagcgcttcaccatggacgaggggctcaaccgcgcggtaaacgaagtgttcgtgcgcctgtacgaaaagggcctgatctaccgcggcgcgcgcatcatcaactggtgcccgctgtgcgaatccgcgctgtcggacgccgaggtggaatacgaggagcagcagggcaacctgtggtacatccgctatccgggcgagcatggcgatgtgatcgtggccaccacccgccccgagaccatgctgggcgataccggcgtggccgtgcatccggacgacgaacgctatgcgaacctggtgggcaagaccgtgcgcctgccgctgatggaccgcgacatccccgtggtggcggacgcctatgtggaccgcgaattcggcaccggcgcggtgaaaatgaccccggcgcacgacccgaacgactttgaggtgggccagcggcacaacctggaaatgatccgcgtgatcaacgacgacggcaccatgagcgccgccgcgggcaaatacgcgggcatgacgcgcgaagactgccgcaaggccgtggtggccgacctggaagccctgggcctgctggtgaaaatcgagccgctcacgcacaacgtgggcacctgctatcgccaccatgtgcccgtggagccgctggtttccacgcagtggttcgtaaagatgcggccgctggccgaacccgccattgaggcggtgaagaacggcagcgtgcagttcatccccgagcgctttgaaaagacctatttcaactggatggagaacatccgcgactggtgcatttcccgccagctgtggtggggacaccgcatcccggcctattactgcgagtcctgcggcaagacgatcgtggcccgcaccgcgcccgaagcctgcgattgcggcggcaagctgcaccaggacgaggacgtgctggatacctggttctcctccgcgctgtggccgttctccacgctcggctggccggaagaaaccgaggatctgaaatacttctatcccaccagcctgatggtttcgggttacgacatcatcttcttctgggtggcgcgcatgatcttctcgggcatcgagcagatgggcgagccgccgttccccaaggtgctattgcacggactgatgcgcgacgcacagggccgcaaaatgagcaaatccctgggcaacggcatcgatcccatggaagtcatcgccacctatggcgcggacgcgttgcgctattcgctgatcatgggcgtgtccccgggcgcggacgcgcgcatgagcatggaaaagatcgaggccaaccgcaatttcgccaacaagctgtggaacgccagccgcttcgcgctgatgaacctggaggattgggacggcgcggccttcgatccgcaaaagctcgatttgagcgacaaatggatcctcacgcgctatcagcagacagtgcgcactgtgacggaaaacctagaaaacctcgatttgggctttgccgcggaagcgctgtacgattttgtgtggagccagttctgcgactggtacatcgaattggcgaaaatccgcttgaacggcgaagatcgcgccgcgcgcgccacggcgcagggcgtgctctgccacgtgcttacgggcattttgaagctgatgcacccgttcatgcccttcatcacggaggaagtgtattccttcctgcccgcgcatgaaggcatgctgatcacggccagttggcccgtgccggacgcagcgctggatttcccgcaggaaaccgcgcagatggacggcatcatggaagccattcgcgccatccgcaacctgcgcgcggagatgaacgtcgcgcccggcaagcgcgcgcacacgtatgtgcggcccgcggaaggctggagcgaggcgctttccggcgcggaaggctattttgcccgcctggccggcgcgagcgcgctgacgcttttgcaagagaacgaagcgaatccggaaaagagcgcttcttgcgtgacgcccgcctgcgccgtgttcatcccgctgggcgaattggtggacatcgataaggaaatcgcccgcctgaaaaaagacctcgcccgcgtgcagggcgaaatcgcgcgcggcagcggcatgctggccaacgaaaaattcgtgtccaaagcgcccgaagcgctcgtcgcgcaggaacgcgaaaaactggcccaaaatcaggctttgctcgcctccatcgaagcgcgcattgccgaaatgcaatcgctgtaatcccattttgcgccgccccggcagaaccggggcggcgcgttttggcatctaggcgcgcagtgacattttcgcccagaaaaaaatcgattggggcagcggttaaatgggccgttgactcgcctaccactgtgcggcgaaacattgacagccccatggcgctgtgctacaatgcaggtaagatacaggatgcaggggagggatggcaatgcggtttagagtggcggcttttgttctggcatttgggttgtttttcgcctgttgcgcctgcgcggagggagacgtttccagcgaaattttggaatatgccctgcaagcgcgggcggatttgagcgcggttggccagggtctggatgccggggcgctgtttccggaggccggtgagtttggcggccgggaagcggctttgatcgactttttgcgcgaggggctgcaaaaagcgcccaaaaaatgcctggtgctggtggggagcgatccagaaaaactttgggccgcggaaaatttgagcgccaagatcagcggcgcggactttagcgtgctggggccggcgctttgcctggcgccgttgagcgccgcgcaggagctagagaccggcggagtgtgctgcggcttgatggatgcttacagtctgtatgatgcctttccctgcgagtgggattttcgcctcgcctatgcgatacagattgccacattggaagaaccaattctcgtaacagcgctatatcgtgaggaaacgggagcggtttttgccaaaacccaggcgcttatcgcctcgcaagtggatgtgctaaccgcatatttgctggcaaacatcgaggcattttgggggaaggattcctttgcgtctactttttatgtgcggcaagaggatgggagctttgcgaaagaagcgagggggttttgacggggagaaaacggcattccgcaaatccacagaaaccctgcgccaaagacgcgaaattgtcacggcgcaatggcgcgaaaaacgccattgcgccgtttttgcgagcccgtgcccattaagcccgcgaagcggcggcttccttggcatacgccccagcttgcgcgcgccacatgcgggcatacaggccattttggcgcaggagcgcttcgtgcgttccttcttccgcgacgcggccgccttccagcacgcagatgcggtctgcgagcgtgaccgtggacagccggtgcgaaatgaacagcgtgctttttcccgcggcattttccgcaagagtgcggttaaaccgcgcttcggcgagcggatcgagagcggcggaaggttcatccagcaccaggaagcggcgctcgtggtacagtgcgcgcgccgtggcgagccgctgggcctgcccgcccgagagtgcgatgccctgcgaagcgaattcccgggtcatctgcgcggcgagcggcacggaatccgggaaattggcccggcggagcgccgccattgcgcgcgtttcgtcgacttccacgtccatcgccacattttccgcgagggacgccgcaaaaatgtgaaaatcctgcatggccgtggcgaacagcgcgcggtagcgcggcaaatcgtattcccggatgggcacgccatccagcagaatcgcgccttcggtcggctcgtacagccgcaggagcagtttcacgatcgtggattttcccgcgccattttcgcccaccagagccagtttttcgcccggccgcagagtaaggttcacgcccttgagcaccggagcgcctgaatcataggcaaagcctacgttttgcaattccagcgtgccatggctgggcggcaggcgcgtgccgcttgctatatggctttgcgttgcataaaatgcgcgcaaatcccgggcatacagcgcgtgcgacgccatttccggcagcaggacggcgatatcgcgcatgcgccagatggtgttttccgtggcaaacgccagcgaaagcatgccgcccacgctgatggaatggcgcaccaacgcggcaaacgccaaatagccgtacacgccgccgttgaggatcagttgttccgtggcgagttcgtcgatcaagcccaggcgcagcaagcgtcgtccgctggcaagccgctgatcgcgcgcgcccgtaagcgctcggttgagcatggcgaataccggcccggcaatgggggaaacgcgcagttccttggcgaaatcggggagcgtgaataggcgttgcgcgctctcgcgccgccgttcatgcggcttgagcgcggcgtcgcaatcgtgtgcgatgcgggcgcggcgcgcgtcgatgagcagggaaaccgccacatagagcgcgacgggcaaaaaggcgtagggttcgagcgacgcgattgcgccggcgtatcccgccgtcatcagcaatgtggaaaacaggcgcacggccgtgtcgaacgccttcatggcgcgctcgtccgcttcgcgcgcggccagcacaaaggcgtcgccaaagcgaggatcgtcgtaatgggccaagtccacgctggcggctttttcatacagcggcggaagcgcggcttcatgcaggcgcacgagcgcacgcggccgcaggcatttttcctgcaaggcgcgcaaggtaaagcgcgcgcacagcagcgtggccatcagcgccagcacggaacaaatttcgcgcagcggagcgcggcgggcgagcgcgtccgtaagataacggggcatcagcgcattcgccgccacgttgtccgccgcgatcagaatcgccgtgcatacggtgagcgccgcgtagccgcgcgcgtgccggaatacgattttcaaaagatatgcgttgtctgcgaggatggccttaagtttcatgaggcgcgccctcctttcggtatcgttctgcctgggcgaaaaagagccgggcatacgcgccgccgcgcgcgagcagttcttcgtgcgtgccctgttcgacgatggcgccattttgcatcatcaccacgcggtccacccatttaacgctggtcaaccggtgggaaatgaagatggtggtgcgcccgcggctgccttcccggagggccgcaaacagcgcttcttccgccagcggatcgagcatggcgctgggttcatccaaaattgcgatgggcgcgccggaggcaaaaacccgcgccgcaaacaggcgctgtgcctggccgccggaggggttccagccgtccgcgtcgaattcccgcgtaaccgcgcgcgatggcgcgagccccacaagccccgcgcgattcagcgcttcgcgcacggcttcttcgctttcgacgcggcctgcgcgcacattttcggaaacgctgaagggatacaggcgcgaatcttgaaacgccacggcgaattgcgcgcgcagggaatcgagctggtaggcgcgatagggccttccatccaggagaatctcgcccgcctctggatcgtacagccgcagaagcagctttacgagcgtggttttgcccgcgccgttttcgcccaccagcgcgatgctttctccccggtggagcgtgagcgaaacgcccgtgagcgcggcgcgctttgcgccgggataggaaaaccgtatatcctttagcgcgatttcgttttgaaaggcgcagggctcgctgccgccgcgcacacggatttcctcgcgcataaacgcgtccaattgcccggcggcgtgcgcctgcttgcgcaaggtggcgatgtgttccccgcttttttccacaaaccagatcacattgttgatcgcgccggaaatcgccgcgaagtcgcccagcgtaaacgcggcgcacgcaagatagcgccaggccgcatagccatacaggcccgcatacagcaccacgcgcagcaaaaattccgcgccaatttcatagagggcaatgcgccagccgcgttcccgggccacgcgcatcagtccagcgcacccttcccgaaagcgcgccgcggcgattttgcccgcgccggtgaggcggatttcctgcgcgtattccttcagcagtaaaacgcgccgcgcatacgccgtgcgccgccggtatggttcgcacgcttcttccatgcgcccttcctgcgcgccctttttgcgctgccaatgtagcgccaacgcagcaggcagcgcgatgagcggaaggagcgttccatccacccaaacgacgtagagcgcgttggcaacgaggatacatgccgtggcgagcagatcgctcatggcgtccagcgccgctagggcgctttcgcgcgcggttgccgcggcgcggcccatgcggtcgtaataatcgctatcctcaaagcaggcgagatccgcgctggccgctttttggtataccgaggccgccagcgcctgctcaagagcgcagtcgctgcgcggcacgaaccggtgctcgtaccagcctttaagaagggtattcgcaacgcccatcgcgcaaaacaccgccagcaggcccagcacgctttcaaaggaagcgcgcgcctggatggcgttcaccagttgccggaacagaacaatcgtataaaacgcgccatagcaatagctcaggctgtacacagcggcctgcacggccacgcgcgccacggcgtttttgccaccaaggcgcaaaaaaatttggcatttccacatgtgctttatcctccatggcatagaaaaagcccccgacagcacactgccggaggctccatcgcaattttctatccatcggcacgccaaccacaccacgcgcctttggccgtggagcaggaggaaacggcgcaaaaacccttcgcgccagcggcaaacaccgccagcgccaaagcgccgcttatggccgatgggaaacgggcgctatgcccgcgcatttggctccacacaatgtcccatctttcttgcatgcgtggagcagagcgtttgccggaaaaaaagaggcattttcatcaccaaatgtatcatagcatggttcttcctggatgtcaagcaaatccttaagccagcttgtcaaaaaagctggtggacagggaagcttgctatccacaattcgcacggtcactctgctgcgcctaacggcttgcagcgctccctttcgccatctattgccatgcgtttgcaagggcgcgccgcctatcgcgcgtacgtcttctctacgatcttcaccagaagctggctcacggtttccagcgcctgggcagtgatgcactccaatacgccgtgcccgttgtggccgccggtgcacaggttcgggcagggcaggcccatgtacgagaggcgcgcgccgtccgtgccgccgcgaatgggcacgatgatgggttcaatgcccatctcctgcatggctgcgcgggcggtatcgatcaggtgcatgtgcggagcgattttttccttcatgttataataggaatccttgagatcgagcgcgagcgtgcccgcgccatagcgcgcgtcaatgaattccgccgcgcggcgcatcagctccttgcgcgcctcaaagcgcgcgcggtcgtggtcgcggatgatgtagccgagttccgcccgcaccacgtccccatgcatttcatccaggtggaagaaaccctcgtagccttcggtgtgttccggccgctcgaaggcgggcaacatggcatggaattccatggccacgttgagcgcgttcaccatgcggtctttggcgctgccggggtggatgcccaagccatgcacggtgacatgggcgctggccgcgttgaaattttcgtattcgatttcgcccacttcgccgccgtccacggtgtaggcaaagtccgcgccaaaggcctgaagatcgaaggcgtccgtaccgcagcccacctcttcgtcgggcgtgaaggcaatgcagatcttgccgcgccggatttccggatgggcgagcaaaaattccgccatggtgaggatttccgcgacgccggccttgtcgtccgcgccgagcagcgtcgtgccgtcggtaacgatcagatcctgtcctacgcatttggcgagcgcggggaacatggccgcttcgatggttacgcccggcgcgagcgggatatcgccgcccgcgtagttttgcacgatgcgtgggcgcacgtttgcgccgctggccgcgggggacgtgtccatgtgcgccacaaagcccagcgcgtttcgatccggcgcggtggcgggcagcgaaccatatacatagcagtgctcgtccacgcgcgcatcgcttatgcccatttcgcgcatttcctgcacgagagcgttcgccaggtcgaattgcttttgcgtgctggggatggcgttcgcgccgtccgcggattgggtatcaaagcttacatagcgcaaaaagcgctccgttgccgttgccattgttgtacctcctattttcgcttgcgcaagatagatagtatgagccccacggacaagcacaatcccagcgccacgcagatgagtcccagcgcgcttgcgcccagcgcaaagggcgctgggccgttcgcgcacagcagcgcgccgcccgtgagcagcgcgagcgccagcaggctcaaaatcagccggttgcccagcgcgagcaaagcgcgcgccagcccttctgagggggaaagttccaaattgagtttggcgcttccgcggttaaaggccttcagccaatccgcggcgagcgccggaagatccagggatttgtccagcgaatcgtacaccgaggcggccgcgctcttgagcttcttgcgcgccgcctcttgggtaaacgcgtcgcgcgagatgtgcgccgccgtggcgcgcatgatattgaaatgcggatccaatgccacgaccacgccttcgatggtgctcagaccgcgcgccagcatggacatgcccggcggcagcgcgatgccgtgccgcttcgccagggcgagtacgtcgtcgagcagctgcggcatgctgaccgattcgagatccgtttcggcatagcgggagagcagcgcgtcgatgtccgcgttgatttgcgcgtggtcgacgggcccttttggctggcccagcgcgagcaacacgcggcgcatagcgtccacatcgtggtgggaaatggcgcgcaccgcttcgccgagcagcttctggtcgcgcggggacaatcggcccatcatgcccaggtcgatccagaggatctgcccgccgcggatgcgcagattgcccgggtgcgggtcggcgtggaaaaaaccgtcgtccacgatctgtttgatgtagttgtccgccagcttggcggcgatttccgcccggtcgtatccggcgcggtcgagcgcctccagatcgtcgggcgaaaatccgtcgatgtattccatcgtcagcacatgccgcgtggtgaacgcgcggtaaatcttcgggcaggaagcaaaggccacgccctcgttgcgctggtaaaattcttccgcgttggcggcttcccgcaaaaaatccatctcctgctgtgaaaccgcccaaagctcgtccagcaccagggaaaaatcgatggtttcgcccgtgcccgccgccagcttgagcaggcccgccgcgcgccgcaagagggcgatatcctgttccatggtttcgtaaatgccgggccgctgtacttttacgaccacgctttccccacttttgagcgtggcgcggtgcgcctgcgcgatggaagcggaaccgagcggcgcttcatcaaaggtggagaacagttccgtcagcggcgcgcccagttcgttttccaccgcggcgcgcacttccgtcagcggcatgggcgccgcttccgtacgcagtttggccagttcctggcaatattcgcgcggaatcatgtccgagcgcagggagagaagctggccgattttcataaaagtggggccaaggtcttccagcaccaggcgcagtttttccggcgtcagcccccgcgttgcgccgcgctggcggaggatggaaaggatctccttcaggcgcgcggcgtcgccgcgcaaaccgctactcgttgccatccggagagtccggcgcgtccgccggcgcatcttgatccaattccgcgagccgctggcgcagcgcgtcgcgctgctctcgggtcatcgaatccacacagcgcagcagcgcatcaccatcctgcggcgaaaccgtaatggtgacgtgttccttcacgcgctctttcaaatcgtgcttcagctcttcgttgcgcactttgccctcttccacagtgctttcgcccttttgcaccagctcgtgcaagagttcctggcccttttccgccgtggcggccgccgcgccgacaccggccagaatcaccttgcgcagtccttcttcccaatttgccatatgtttcgcctcctatccattcgggtatatcaggaattctctatttcccgccgaaatcctctttttttgcgttgccaacgcaatttgccttgacgaaaaagcgattttgcgttacactgaaattagaaatcaatgggggagagaaatacatgagcatcaaaaaggaagacattgcgcgcgtgaagggtatgggctttttgctcaatcggggcacggaaaaattttctggccgagtggttgcgccgggcagcgtattcaccgcggaacaggtcaaagcgctggccgagtgcgccgaacgctttggcaatggcactgtagcgttcaccgtgcgcctgtgcgcggaaatcgtgggcattccttacgaaaacatcgaaccggcgcgcgcatttttgcggcaggcggggctggaattcggcggcaccggcgcgaaagtgcggcccgtggtggcttgcaagggaacgacttgcgtctttggcaattatgatacgcaagcgctggcccgccatttgcacgaaaagtattatgagggctggagcaatgttgccttgccgcacaagttcaaaatcgccgtgggcggctgcccgaacagttgcgccaagcccagcttgaacgattttggcatcgaggggcatcgcgcgcccgtgtatgatagcgaaaaatgccgcggctgcaaggtttgcgcggtgcaaaccgcgtgcccggtgaaagcggtttccatggaagatggcaaagcgaagatcgataccaacgcttgcattagctgcggcgtgtgcgtgggcaagtgcccgttccaggcggtcgcgcacgagagcgaaacggtctacgccatctatgtgggcggcacctggggcaaaaccacgcgcaatggcacccgactttcccgcatggtgcgcgcggatgaaatcgacgcgctgatcgagaaaactatgctctggttccgcgagaacgcgtaccagaaagaacgcctgggcaaggccatcgaccgtttgggcgtggatgcgctggaaaaggcgctgtttggcgatgatttgctcgcccgcaaggaagaaatcctcgccgcgcccatccgcaccgcgccgtaggcgagcggaattcgcaaagccagccaagatacaatcatagaaaaccgcccggatactggcgtgccagcctccgggcggtttgcatcggatattaaatttctttcctccacagcccatgcaggttgcaatacgcataggccgcgatgggttcgtcgtccaccagcgcaaaggccgccgcaggcgcttcgcccgcggccaggtttttgcgctgaccgccttttttcgtttgcagatagatccactgaatggaatgctcctccaccatgggatgcgcggccgcgcccaccgcgacatgcacttcgttgccgcgcaccgcgatcacgggcacgtgcttttcgccactggcatcggtggtgttgggtacgagcggctgcatcttttccccacagcacacgacaggcacgcccgcgctatggatcatgccgatgatgttgccgcaatggttgcagcggtaaaaacgagtttccgccatggtaaaacccctcccgccttaataattctgcgcgcgcagctcaaaatagctttgcggatgcttgcaaaccgggcatacctcgggcgccttcgtgccaaccacgatgtggccgcaattgcggcattcccaaaccttcacttcgctcttttcaaacacgcgcttggcctctacattcgccaggagcgcgcgataacgctcttcgtgttccttttcaatggccgccacgccgcggaactgctcggccaaatcgtggaagccctcttcatcggcttcgcgggccatgcgcgcgtacatgtccgtccactcggcgttctcgccctcagccgcgtgcagcaggttttccgccgtgtcgcccagctcgcccaggtgcttgaaccacagcttggcgtgctccttctcattctccgccgtcttcaggaacagcgcggcaatctgctcaaagccctgtttcttagccacggaagcgaaataggtgtacttgttgcgcgcctgcgattcgcccgcgaacgcttcccacaggttcttttccgtgcgcgtgcccgcatacgggttcttgcgcggcgcttctatgactttttcaaacttatccgccgaagccttgcagatggggcaggtgaaatccgccgtaatcggcccttcatgcacatagccgcaaaccttgcacttccatttttccatgttggccagcctccttatttttcgtcgtgacactcgtgcgcgtgctcatgcttatggcaggcggacgcgtcgctgtgcaattccccgcgcagataggcttccgccgccgtgcgtgcgtcgcccgaagcgcccaggatcgtttcaatgttgcgatgggcaaaaatacccgccgcgctttcgcccatgcccccggcgatcaccacgtttgcgccgtggtcgcccaggaaattgggcagaaagccgggccggtgcccgggattcgggatactttcctctttcacaatcgcctgattctccacatcgtatagccagaaattctcgcaatgcccaaaatggcccgcaacctcgttcccattcgcggcaaccgcaatcctcatcgcaaatccttccttcctatttcgcaggcagcgcccacaccccgcgcggcaacagccgcagcgcgccgcgccgccctcgcacaggcggtattccccgcccaaaattttgagtggccggccttccacaagcgcgaacgaaatctttttgcgcgccgaatcgacgatctgctgcaccgtggcgcgcgcgatgtgcatctgctccccgcattgctcctgcgagtagtcttccccatcgatcagccggagcgcctcaaattcatccaccgtgagcacgatgggcgacgcatcctttcgcccgtccagcggaacaaattccgatgcaccgggcaagcggcataccatcctgcactttcgcggcctaggcatagcgcggattcctcttttctttcgcgtttatggcatatgccatttactcaagggtattataccacgttttgccccgctgtcaacccgcacggttgacaaaatccaaaatttcatatatactggccccagcgaaatatttggaggcgcaagcatgaccctggacacatttttccccatctggaaccagcttacaccgcaggaacagagccttttgcgccaaaatgctgtggaacgcgacttgcccaaggggactgtgctcagcgccgggccccaggattgcaccggcctgctcgccgtgcaaagcggccagttgcgcgcgttcatcctttcggaagaaggacgggaggtcaccatttatcgcctgctggagcgggacatttgcctgttttccgcctcctgcatgttgcaaagcctgcaattcgatgtttctatcgaagtggaaaaagacgcccgattgtgggtgatcgccgccgaggcctatcagcgcgtgatgcaggaatccgccccgcttgccaattataccaaccagctgatggccatgcgcttttccgaagtgatgtggctgatggaacaaattttgtggaagagtatggacaagcgcctggccgcctttctgctggaagagagcgcgctgagcggcgattcctgcgttcgcctcacgcacgaaaaaatcgccgcccatctgggaacagcccgcgaagtggtcacgcgcatgctgcgctatcttcagggcgaaaacctggtgcggctcgcccggggcgaagtgcagatcctgcatccagaaaacctgcgcgcgctggcggaagcctaaagaatcccttttatacccggccagttggccgggtttttgttaactttataaaactcctccaatttcctcccacaccggggtctaatggacagaaagccaaaacacaaaaggagggaaacgccttggacaaagcggaattttcgcgccgcgttctcgcctgccaaaaccgcctgtatcgcgttgccatcgccattctgcgcgccgatgcggacgcacaggatgcagcccaggaagcgctcctgcgtgcgtggaagcatctgcccagtctgcaggacgcgcgctatttcgaaacctggctcctgcgcatcttgatccgcgaatgccaacgcgcgctaaagcggcgcggcaaacggccgcttccggcagaaagccattggctggaaaaccgcgccgcgcccagcgattctggcgcggatctgcgcgacgcgttaaaccaattggagctcaaataccgcctgccagtggttttgcactatatcgaaggatattcctacgcgcaggttgcggaacttctgcgcctttccgaaagtgcggctgcgtggcggacgcggcaaggcgtggaaaagctgcgaaatcttttactatgaggaggcgaaccgcatgaatcccaaaccaattccctggaaacaggcttatccagacgcacctgcgccctttacccgtgcgctggaaaaaacgctcacgaacctggaggaaatccggcccgcaaggcggcgcatccctctgcgcgcggctctcgtcgcggcggtgcttttctcgctggccgcagggatggcaacggcatgggtcaggcactggagcatcgcggactttttgcgccaggacgcagcccttcccccacaggaagccgcgcaaatcgctggcgccgcgcgcgaagcatcggtgaaaaatctcggcagcgatagcaacggcgttttgcgcatgaccgtacgcgaggcggtgtacgacggcatggaaatactggtgctggtagaggtcgcgccagaacacgatgattgctatccggtagactggctgacggaatggtggcaggagtcgcttccgcaggaagagctggagcggcgcacgggcaagcgaattgtggaaacgggcgagtgcttctttttgcccccgcaccgcatgccaacgggtcgcgaacccgtttacgaggatgcgaaaggcggcgaatataccacgaccttcgatgtgaagcgggaggacaattcgctcgtgtacctgcttaccgtgcggccgggcgagggaacttatatggacgaggaagagagtgtattttgcgtgatgccctgctcgcggctcgatccgctcgtcgtgcggctggaaattgagcgtttctcccagcctgaagtgggagaactggtggtaaacggcgcgttcgatgaagcactgctcacccttcgcagcgctgcgcttacgcgcacgccgctgaacgcgcatctggccatcgatttcaccctgcccacatccgccacgccgcccgccagcagcgatctcgtatatttcacacaaggcggtgtgttttatcacgcagtcagcgactgcatgggcatggattccaaccttgcggaacatagaacggtaacggaggcggaatcgcttggcaaagagccctgccccaactgcattctcgcactgccggaaatgcgcttcgcgcttctggcagaagacggccgcaatctggaaatgggccaaagcagcgttgaaatctcgaatagcggcccctggggcgcagccgatggattccggcaagccatggatctgaccagcgttttgcccgaaacctgcgtgctccaggtgctgaacgcggccaccggcgaggtgctcgcggaactgccctgcgatgtccggtttggcgcaaattgaatcgccaggcaggaattgccgccgcgccagcgaatgttttcttcatatatcttattgacggggagaatcgaatatggaaaagcgcctctgtgccccctcctacctgctctttgaggaagggaagtatttcaaaagctgccatgcgtccagcattctcgtgctgaaagacggcacggttctggtggcctactttgccggtgaccacgaaaaagccgacaacgtgggcatctggctttcgcgctgcgaaggcggcgcgtgggaatcgccgcgcgaaatcgccaaggtcgcgccagtggcgcactggaacccggttctgatggagatcgcagatggcgtgcggctggtattcaaagtgggggcggaaatcgcggattggctgagttggaccatgacttcgcgcgatggcggttgcacgtggagcaagccgcgaccctatggcgaagcgtgcggccccgtgcgcacgaaacccatccggctggcgaacgggcggctgctggcaggcaattccgaagaaaaggccaccgatcggctgcgctggcggacattcgccgatgtttcaacggatgacggcgcgcacttttcccgcctcgcacccattcccatcgagaacggctgcgcggacgcgccgaactacattgcaggagcgggcgcgattcagcccgcgctgtgggaagatgtgcccgagcatgtacacgcctttttgcgcacgacgggcggctaccttttccgctcggacagtggggatggagggcagagctggtgcccggcttacaacaccggccttcccaacaataacagcggcatcgacgccgtttttgcgcagggcagtgtctatctggtgctcaatcccgtttcgcaaaactggggcgcgcgcacgccgcttgccatcctccgctcgcaagacggcggcgaacacttcgaaccgttcttcacgctggaagatatgccatgggacgaaaaggaaaacaagagcgcggagttttcctacccggccatggtgttcgatgggagggctctccacatctcctatacctatatgcgcaggagcatcgcctaccggcgcattgcgctgccttgagaaaaatggccttgaaagaagcaggcgaaaaatggagcgttttgaaacatgaatagcgttttgattatagacgatgacaaggagctttgtgccttgatgaaaaaatgcgtggaacaggaaaatttgtctgcgatggtagcgtatggcggtttggaaggtctgcggctgctggaagaaaacaaggacgcctgttccctgattgttctggatgtgatgatgccggatatggacggctttcaggtattgcagaaaatccgggcaaaaagcaatgtgccggtactgatgctgaccgccagaagcgatgaggaagataaagtttccggcctgcggctgggggcggacgattacctgacaaagccttttggcattaacgagctgatggcccgcgtcaattccctgatccggcgctataccaccttaaatcccgtaaccggaaacgagtctgccaccatgctgctgaaaggtatggtgattgataaaatcagtcggacggtgaccgtgcaaaatcttccggtagagctgaccggcaaggaatttgacctgcttgtgtttctggcggagagtaagggccgggtatttaccaaaaagcagatttacacgcaggtatgggcggaggaatacgcctttgacgacagcaacattatgtcctttatcagcaaactgcggaaaaaaatcgagccaaatccagaacagcccttttacatccagaccgtccgtggcgtggggtatcggttcaataaggaggcgtgagcatggaggtgaacctttatctgctgctggccttatggattgccctgctggtgatcgcttaccttttggcaaaacttcaccgcgtccggggccagctttccctgattaaagatgccctggcggatataaagaacgggaacctaaatcgccgcgtactggcgcgggaaagcgacttgacgaagcaaatctgctatgacatcaacgaaattgctatgggcagccaagcccgactgattcagcaaaagcaatccgagcaggcgtataaacggctgatgacaagcctttcccatgacgtgaaaacgccgcttgcctctctggtgggctatttggaggccgtggaaagcaagatggtgacaggagccgagcaggaagaatatattcgggtggctacggaaaaagcccatcacctgaaagactttgtgaccgccctgtttgaatgggtgaagctggatgccggggagcagatttttcattttgaagtctgcgacctgaacgagctttcccgcaacattatggctgactgggtgccgctgctggaaaatcacaatctttcctatgagatagagatacccgaaacagaatacatgacaagggttgatcccaccgcctacacccgtattctcaataacctgctgcaaaatatcctgacgcacagcgacgcaaggcaagtgtccctgaccataaccgaaacggagcagcaggcaaaaatcatggtggccgataacgggaaagggatttccgccaccgatctccctcatatctttgaacgaatgtatcaatgcgaccattcccgttctgccaaagggaacggactgggcctctccattgcaaaggaactggtgagcgcccataaaggaaccattacggcagccagtgtccccggagctggcacaacctttacccttacacttccgaaagccctgtgatcgcgcagggctttcttgcgttcaaagcaaggttaaaacaagattctggcaaggatatggcaaggttcgtcctttataatgggaaccatgaaaggaggaaaccgcatgacgatccttgcaacggaaatccagaaatggaagcggaataagattgtctggtgcattctgggcctgacgctgctgtttggagcgtttgcaattgagcgggcttgcagcattgcaaggagcagcccctacatggacagctttggcgacctctacacgctggcgtttaagaacctgtccagtctattcctgccggttgtgctgggaatgttcgccacaaccttgttttttgacgaacgcaagaacgacacactgaaagaactgctgattatcccgatcacaaaagcgcaactctatttttctaaggtcgctgtggtgatcctgatgtccgtgggattgtgcctgattacctttcttttgtgcgttgtcggtgggctgatcgccgggggctttcccgacctgaacgcccatacactaatgggtgctggccttttgtatctggcgggcgggcttctgatccccatagccatgctaccgatcgtgtttcttgccacgctgtcaaaaagttatgtcctgccgattggcatgacgctgctgtatctggttcccgtagtcattgctccggcctatcttacgggaatacacccgctggcaagcgcaatggggatttatccccacatttccgaagcagccgcagctatggtagaaagcctgatgcaaggcattttgccccatacttcgccgcttgtttgcgtcggttcactgctcctgagcggagccgcatttgccgccgcatccgtagtgacgctaaaaaaacaatcttactgaaaggaaagacctatgaaacgatggatttgtttatgcctctgcgttctgttcgcttttttgctttgcgcctgccagcaggccgccccatctgccagcgaggcccccgaccagcaggccattatagagaaagcgaccgaatactttcaccagatgatggagggagattttgaaactttcttccatgcgctgccgcagggcgtacaggccaatacttctgctcaggcaatccaggaaacatgggaggaagaagccaataagctgggcgggctgccgaaggacgcttccccggaggtgtcctgctatgtgccggaacactccgagcaagtccgcgttgaatttgtcattccctgtgaaaagggcgatttcaaaatgttcatcaaccattccccggatggcagcctttacaactatgtcatttggaaaaatgaagcggaataagaaggagagtcatctttatgcgtgactttgtgattgaaaccaaaaagctgacgaagatttacggcgagcaaaccgc

SEQ ID NO: 4496 - DNA, 4577 bp, Unknown
  16S sequences of unknown bacteria
ttaccgcttcccccgaagccgtataattaaacttgggcatgacgaaataatgatcgcaccagctcgtttccttaccttccacgatgagaaacagcatatcccccgcggacataggcagcgtcaacacggaagttttcacaaaatacgcgtcgggttctgcttcccgttcgaacaatgtctgcgcgtccgaaaaagcgtaagtgcttctgtcgtatctcctcacggctatccggaaacggacgccgtcgcagccttcgctgtccgaaaagctggtgtttttctcgcggatgatcgcttccaattttccgtccgcctgcgcgcgatacatcaacatggtattgctgccgttttcccccgtcgtgaattcgtaagaggaactgatcttctgatacgtttccccctgccaattctccccgtcgaatttcattctttcgtactttttttccacgtcccctttgagataccaaacgccgcctgtcccttgctcctgcgaaaaaccggcggtcagatcggagtccggcagctgcgcgtattccgcggaaaacttgtaatattcgttatccgaagccgtatcgttaagaccgggaacatatttttcgtattcgtcctgcgggtcgggcgcgtccgtccccgcggaaacaaacgccgctttgacgtaataattgcatttcatctcgtcggcgcagagcggattcatctcgaacaaaaacttttcgttctttttcacctcgaacatcttgccgctgagattgaccgcataatctttcgaagccgtttccccgtacacgagggtacaggcggattgatcacagcgatagacgttgacctcgtatccctgagccgtgttgcccaaaacagaattttcgatctttcccgtaaagcgcacgcttcccgaggacggcgctttccataccgccacgacgccctgcataccgaagcagtgaaattcgtttctccaccagatgccgttccacgtttctccgttgtcgtcctttttccaaaggttgcagtcggcgtcggaattgtatttccgccccaccgccgacagctccgagtatccttcttccacactgcccccgtacagataccagccgttatccccctgcttttcctgaccgatataatagtcttcgtaaacggaggcgtcgtaagtaatttccgttccgacgaaggaatccgactcggctttcgcaggcgtgccgcggcccccgtttcccgcgcacagggcgagggaaagcgcgacggcttccaaaaatatcaaacagccgcacaacagttttttcataatttcctcctgtcctttttcatccgcgggtttctcttttccgcgatccgttatcattatagcgtaagtttttcgccttttcaatggataaacgcgctttgtttaatggacaaaaggaacgtcgtgaaaaaaaatattgacaagcggactttattactttataatatttcttgtcgtaagggggcacactatatgaagaaaagcggaagcatcgtaagaaaaattctctttttcaatattttcacatccgtatccatcgtgttgatcttcaccgttttatatatggttttcagctctatcgagctgaaaaaggatatggaagcgcgttcggaagccgtggggacttcttcggcgtccacgttggacgtggtggcggaaaattgcctcaataccttagcgaaaatcgaatacgacaaaaatttacaggcgtgccttgccgccgtgcgaagcggggaaacggaaagcgccaaggcgaaaatcctcctgcgggacatcatcgacgacaatatcgcgctcaattacgtgtttctcggacttgtcgtcacaggggacggcggcgaaacaaaataccaatcctccgcccttaccgtccccgaggagatcgtcgcggaagcgaaagacaaactcggctcgtgcaccactttctttttcgtccatccccgatacgaagacttcctttttctcgcgcagcggttttatctcgaaaacgattcctattccttggaatttccgccgcagaattattcggtctgtatgctcaacagcgaaatatttttcaacagcgtcctgccctcgggaagtctgctcgaatataaaatgaacgtgagttacggcgggctgcctatattgaccgaaagcgccctgcgcggcaaaaccttcgaatgtgaaaacggattcagcctcgaaatatgcgttccgcaaaacatcatgcctctcaatcccctgaacgtaccgagaagctacctcgccgttctgcttttggcgggaataataacagtatccgtaaatatcatcaacaatatggtgatcacaaaacccatcaaacagctttccgaatactgtgaaaagatcccgcgcgaactcgataaaatccccgaaccttttataaacggcaaggaattgaaagagatcaccgtcaaaatcaacggaatgatagacaacctcaaccgttcgaaagacgatctgttgaaaaaggaacaggacatttacgccatggagctggaaaagcaacagatttctctcgatatgctttacagtcagatcaattcccattttctctacaacaccctttccaatattcggggaatggcgctcaaacacagcgatgcagaggtagcggacgcgctgcatctgttggtgaaatattttcgttattgcaccgaccagagcaacctttccactgtggaagacgaatcgagtttcctcgatatctatttaaaaatacagaccatgcgctttggaaaagcgaacttttcttatgagatcgactgtgaacaaggcgtcgaaaaggaacgaatcctgcggatgcttttacagccgctcgcggaaaactgctttgcgcacggatttaaagaaaagcactccgattgcaggatgaaaatatccgtttcccgtttgggaaaaggattgcaaatcgtcgtcacggacaacggcgtcggctgcgagcaatccgtcgtggacgcgataaataatcaatcgttgtccccttccggagcgggaaaaatcggtatcggcaatatccgcaagcgattacagctctattatcccgattacagcctgacgatgacgtcggacgaaaacggaacgagcgtgatcgtatctttgggaacaggaggagaaaaaaccatatgtaccatgccatcatagcggacgacgaaggaaacgcgctggacgagcttctttacgtcatcgattggcaaaaagaaaacgtcgcaatcgacgggacggcgagcgacggggaagaagctgtaaagctcattgaaaaattccgtcccgacttcattctctgcgacatcaatatgccgaaaaaatcgggaatcgacgtgctgcgctttttgaaagaaggaggttacccctctttattcatcgcggtgagcgcgtattccgactttcattacgttcgggaatgtttggacaacggcgcctttacttatcttttgaagaccgtcgacagagaggaactgctctccgttctcgcaagggcaaaaaaacaggcggacgaaataaagcacaaaaaaaacgacgaacggtacaaaaacgcgctctttgctttaatgagcaacaacgactgcctgcaacatctcaaagatctctctttcgagccgacgttccccctttttaccctggtcaaatcccgcggagcttttgcggggggaatacggcaaaaaaacggcgtttcttccatcgtattgccttgcggcagagagtatctcctccttctcaaccaccaaaagggatacgcggcggaaagcgccttcgccgcccttccctgcgggatcagttcttcctctccccatttaggaagactatactatgaagcggactgcgcctttctctcgggaaaattcttccaaacgcccctcaaccgctatcggaaaacggatcccgccttgataaaactcctttcgtcaaaaatagcggaagcgcgcttgaccgacgatattgcggcgctgcttaaaaacagcctttgcggcgtcaacgagctttgcgccctctacaacctgtttacggacagcaaaaaggaagattccctctcctatttcgatttcggaaaccagtttgattcgttggatgatttcgcgcgctttctcaaaaattacgaccgctcggaaaacgtcctcgacatagaggaagtgaccgagcggatccacggctatatcgctctaaattatgcgcaaaatatttccgtaaatatgctgagcgaaaaatttttcgtatctcccggctatctcaacaggagtttcaagaaaaaatacggcatcaccatcaataaattcatcacggacgtccgcatgaataaagcgatggagctgatcaacagcgccaataatctcactctgctgaaaatcagccagatggtgggatacagcgatttttattatttcagccgcgtcttcaaaaagaatttcgagcgcgccccctctttttataaaaatcaataaaacggacgctttccgcaaaaagcgtttttttatcgcagctttttcaaaagcaaagagaaaagaatgtatcgaaatacgattttctccgcttgcccttaaaagttccctggggcgcgttgctttcggcaacg

SEQ ID NO: 4497 - DNA, 12694 bp, Unknown
  16S sequences of unknown bacteria
tcaaagagagcgcccacaagatgaacaagtgcgtggtggtcgttacccactccaatgagctggcaaagcaggccgatgtggtgttccggctgagaaagggggaactgcaaagggattaacgcttccagagtacagcgccaattcgccgcattctaaatcaaatatcaataataccatgttataatgcggcagaggtgatactttgagcgagcgaattctgatcatcgaagatgaaaccgccattcaatcgatccttgtggcgctgttgacggacgccggatatgccacagaagtcgcgggcgacggtctggaaggaatcacaaaattccgggaaaaacccttctccctcgttctgctggacatcctgatgccaaaaatcgatggctatacggtttgcgagatgatccggcgggaatccaatgtgccggtgatcatgctgaccgcgctggacgaggaagaagcccagattaaggcgtttgaattgcaagcggacgactatatcacaaagccgttctccgtgaagctggtgctgatgcgggtggaggccgtcctgcgccgggcaaaagagcgggaagtgcagaaaagcgcttccatactctcctgtggaaacatccggctggatcgggaaggccactctgtttccgccggcggaaggcccgtttccctcacgcatacggaatatgggctgctggagctgttcatgctccatcctggccgggtgtttacgcgggacaatctgctcaaccacgtatggggctatgattttgttggcgaggaaaaaaccgtcaacatccacatcatgaatctgcggagaaagctgaacacggatttgattgaaacgattcgaggagtgggatacaggcttggcaagaaaaattagcggcagcttaagcgcaaaggctttcctgtggattgcgggcctgctgatcctgtgcagcctgctgatctacggcatcgtgatgcgatttctgccccaaagctatacggttgtggcaagcggccgcgtggaggaagaaatcgagcggctggttgacgcgctttcacaaaccaggtataataacgccggggaagtgatcgagcccttttgccaaagcaaccgggcctccgtgatcctgagcgatggaatcactatgcgcaccttcggcgcagtggatgaacagagcgtggagcacggagaaaccatgaccgccgtggtcgatgtgaagtttgcggatcgggatagcagccattatctgagcattacagcgcccgtgtcggctggcagtgagttgaccatggcctttttggagctgctgccgcttttgctgctttctatcctgctcatctccgcattgggtgcgttcctgtgcagccgggtgctggtggggcccgtgctggaaatcagccgcgtttcccagcggatggcacgcctggatatgacctgggattgcagggtcaaccgcgccgatgaattgggcattttggcaaacaacttaaataccatggccaggcggctggatgccgccatgaaagcgctggaaagcgccaatgaaaagctgcgggaggagatggcgcacatcaccgagctttcccgccagcgccgggatttctttgcggccgcctcccatgagctgaaaacgcctcttaccattctgaaggggcagatcgaaagcatgatcctggggattggcaaatataaggatgcaggaaccgtgctgccggaaaccctcaaagaagtggaaaacatggagcggctggtaaaggaaatcctcacgatctccaaaatcgaaatggatggtctggccgggaaaacagagccggtgccgctgccggaaatactcgccaaagtcacggaagcgctgctcccgctggccagggaacggcagatcgccgttcagtctgaaattgccggggatgtcgcggtatccggcaacgcttctctgttggaaaaggccctccacaatgtcctgagcaacgccatccgccactctccggagggagcgaaggttttgatccaccttaccccttccgttttgaccgtgaccaataccggcgcttctatcccgcaggaagatctgcccgccctgttcacgcctttttaccgggtggaaaaatcccgaaacaagtccaccggcggcagcggcctggggctatacctggtcaagaccatactggaactgcatgggttccagtatcgggtggaaaatacggaaacgggcgttgctttttcagtggaattttgatacaatgggggcatgaaaaattgaaactgcggaggtgttaccatgcttgaaaatataccatctcaatcgactatggctgaattgcttggacaatctttgtttgaagtctggaaagcattatgctcgatgattgaggaaaaatacgacatagaaccagtatggaatgctggatggaagaattggatctacgaatataaatatcgaaagggcagcaagacgctttgcagcctatacgcaaaaagcaattgcgttggtttcatgattattttggggaaagatgaaaggacaaaatttgaagctataagggacggcttttccgataccgtttgcaggcgatacgatgaagccacaacctatcatgatgggaaatggatcatgtttgagccaaccaatacagccgaatttgatgactatatgaaattgttggccatcaaaaggaaacccaatcggaaataacgatcccatttgtctacccacgatccttccaaaacaaaatcaaaatcaaatccgacctaagcgaaaaaccaaccgtccttttgtatgatggaagcacatcaaacgaaaggacggtgtttttatgggcgtttgcagacgggccgccctttacctggcccgcaagaaaggaaaatccatgcttcttttcctgatcttctttttggcatctgcccttttgctaatctgcttttccattttggaggggacagggcaggcagcccggaatctacgttccaacatcggcgcggctttttacatccggccctatgcgcaaatgactttggaggatggcgcgctcagtgaaggaacaacccctgtgatttcccagcagagcattgacgaggtaatcgacgcttcccaggggcaaataaaagccttcaatacggaacattatggctatgccaaaagcgatcagcttcacttcctgccgggcgccggtgacagcgaggccagcaacatgggccgggtaaccgctgtgcgggattccgaatgggccgatgtgttcctgcgcggagaatataccctgctcgctggccgccatatccagccggaggatgaaaacaaaatcctcatcagcgcggaattggcggcggaaaacagcctggaaattggcgacgtactcaccctcacccacgccggtttgggccagcaggacggagaatacatcgataccatcctggaaaagacggccttcgcccaagtggagatcgtgggtattttccagtgcggcaaagttgccgacagcgcggatgcccctaccgccgggaaggcggcaaatcacatgtattccgacagccatctgctagtacatttgcgggaacagcaggagggcgtttatgcgggcgagattgccttttacattgccgatcctctggaactggatgcgctgctggagcgcgtagcggccatcgactccatcgattgggaaaaccatattctgcgaaagaacgattttcagtacgagcagatcgctgggcagttgcaaaatcttcaaggcctggctgcggcgctgattgccattgtctctgttttgagcacggcaattctaatgctgatcctgatgatgcgcatccgggggcgtatccacgaggccgggatttgcctatcggtgggcaagcccaaaacggaaatcattgggcagtttgccttagaagcatgtgtacttctgtgcgctggctttctgctggctgttttattttggttgccgggttccgatgcggcaaatgggcttctgttgggcgcgctgacccagggaacagtgcgggaaaatggcgtcgaagcaaatgctttgcggccggatctccttcgttccagcgcattgttcgccggggaattggcggccgctctgctggctgtgctgatagccagcggcccaattctccgattcaagccaaaagaaattttatccagaatgcgttaaggaggcgtttaacatgaactttttggggcgggcaatccgctattgctggcggcaaaagataagaagcgctatcttgttgctggtctttaccctgttggcttcttcggcgctaattgccttatccgtaggccatgccgcagtcaaaggagccgatgcggtaaaacaaacggtgggcgcttccatccgcatcgaaatcgattccggcaactccggcctctatgggagcggcgcggaaaatgaatggggcacggcgtatcagtatcagggagactatatcacccaggaagtgatagacgccatcgccaaagtggatggcgtagtcgattgcagcgcagaaagcgaaggcggctattggggcgccggcgtcaatttcgcatatttcaccggcgcgttcaacatcgattttaccggcggctacggccaatcggtgccctacacggtgacgctgaactccgaactgagcgcaaactttttaaatggcacctatacgctggaagaaggccggcacatccggccggacgattcctatgcggtgctgatctccaaagagctggccgataaaaacgacctttcggtgggcgatggcatcaccatgtacgacctggacagcgactctgaaaatacctttgagatcgtggggattttcggcggcaccgaaggcatgagcaaagacgccatgatggccgacggcatcccggccaatcaggggtatatagacatgaacagctacaacgaaatttttcaccgcgaggcaatggcgctgggctcgctggacgtctaccttagctctgcagaaaacattcaagaaattctgtataccattcaaaacctgccggagctccagggaaaaacctttatctactccacggacacggaaaactttgcccggatttcccatccgctttcttctctccaggccatgatggatgcggcggtcatcggaattgccatggcaagcgcagccatcatcgcccttttgctgattctctggacgcggagccgcaagaaagaagccggcatcttgctggcagtgggcagaagcaagggagaaatcgtgctgcaattcctggccgaaaacattttgctggccatcccatccgctgccgcctcttttgctctggccaccctgctggcggaagaggttggcgcttacctggttcgccaaaccgccagcggggttacggggctcaccgtggcgatccatgctgcagacatggcggcggtttatggcgttggcgcgccaattctcattctagcggtactgctctcggcagtcactgtcattcgatggaagccgggggtcatactctcgcaaatggattaaggaggcgtcttccatgagcattttaacattttcggatttgaaatacacttacgatggaaaacaaaatgtcctgcgcggcgtcagtgggcaaatggaacagggcaaactctacgccatcctggggccttccggctgcggcaagaccactctgctctccctgatcggcggcctggacagcccctctagcggccagataaccttcgacggacaggacattgccaagacgggcctttccgaccaccggaaaaaccatgtggcgtttatcttccaggcgtacaacctgatcgactacctgacccccgcagagaatgtgtcgctgacttccaagctgccgccgctgcccattctggagcggctggggctgacgaaagaagaagccaagcgcaatgtgctcaaactctccggcggccagcagcagcgggtggccattgcccgtgccctggcaagcgaggccccggtgattctggcggacgagcccaccggcaatctggacgaggacactgcccaggacatcaccgatatcctcaaagagagcgcccacaagatgaacaagtgcgtggtggtcgttacccactctggtgaattggcaaagcaggccgatgtggtattccggctgaaaaagggccttttattcctcgaatagcccgcggcgaaccgtggcgcgccaagcgcgctttcggcctcaaaacgcgaacgccgcgatcttttcctgcaacgccgccacgaattggctgacgtgatacccatcgcacaccgcgtggtgcgcctggatggccagcggcaaaagcgtcttttccccttccacaaaggcctggcccatggtgaatatgggcaaaaggtacttgccatcgccgaatatgttcaggttaaagccttcaaagcgcatccagggcagcatggaaacgtcaaaacagttctccggctggccgggcttgggcgaaaagcggcccgaaggcgcatggcgggccacgtcctcgcggtagcgcgccaaaaacgccgggaaatccccgtcgcacagcgtccagatgctggaaaacgtctctttctccggggaaaacaccgtgtatctggggtgcatttcatcaaaataccccagtccttccgccgtgagctgggtgcggaactgcgcaaattcgttcaccgtctgcgtaagcagccaaagcatggccggataaatcttatgcccgcccagccgcgtgatgtccagccgcacggtgatggaataggtacacaccacctgctggatatagtgctcgtaatactcccggcgcggccaggtttccagatcgattttgtgaaacgccatgtttttctcccttcaaagagcatcgcgccgctttcagcgccagatgcgcatctttgggcgcgatttttgcgggttttatggattcatgcttgaactggcccatccctcatggtatactgaatgcgttatcgcgcgaaaggagggagcggcattgaacttcacgcaaatgctttccgccatcgtaggcgtgctggcgctgtttttgctgatctatggcgcctgcgtgcgctcgcgcaccgtagcgctcatcggcgtggcgctggcaattgccggcgggcttctggtatactacgcatggtggggcgcgatgcccatcagcgcgtaagccgcgcaaaaggccggcaaatcagggttttggcccctgccggttcttttgcgcgtccaaatgttcgcgcaggctcttgtgggtgccgtcctcgtatttcacgcgggtttcatccagcgtgcggcgggtttgctcgcggaaggccgcgatataggccttgcgcaaccgctcgcgctcggcgctttcttcgctcgtcaacgcgcgcgtcttggccaggcgcgccagttcgttgatgcggctgatggattgctggtccatggtctatcactcctttaagggggaaatacgtatgattcgagggaaatacctcacgtcgaaagacgacattgcgccggtgctcgccgtgcgcaacgcggtgttcgtggaagagcagggcttttccgcggaaggggagcgcgacgcctacgacgatatggcgatttacgcgctcgcgttcaacgaagagggcgcgccggtttccaccggccggctgttcgtggacagggacggccagttcaccattggccgcgtgtgcaccctgcgcgcctatcgcggccagggctatggcgatttgatcatgcgcatgctgctgtaccgcgcgcaggagttgcacgcgccggggatctacatccattcccaggcccccgtggcgcatttttacgagcattacggcttccagcccaccggcaaaatcgaatacgacgaaagcgtggagcacatcctgctctatgccaaggcggaggatatctgcctcgaaggctcctgcgcccagtgcgcgaacgcatccccggaggcgaaataagcggcgtatccgccgggacggccgccagggatttcccgcgcgaggcgcgctagttgcgcaaactatgcagcggcgcgggaatgcggccgccccggtggataaagtctgccgcgctttgcgggcgcaccgggatgaccggcgcatgccccagcaggccgccgaattccacgcggtcgcccgtctgggtgcctggcgcggggatgacgcgcacggcggtggttttgccattgaccatgccgatggcggcttcgtccgcgatgatggccgcgatggtttctgcgggagtgtcgccgggaatggcgatcatatccagccccacggagcagacgcaggtcatggcttcgagcttttccagcgaaagcacgcccttttccgccgcctgaatcatgccgatatcttcgctgaccgggatgaatgcgccggacaggccgcccacgtgcgaagacgccatgacgccgcccttcttcaccgcatcgttgagcagggccagcgcggcggtggtgccatgcgcgccgcaggtttccaggcccatttcctccaagatggcggccacggaatcgccaaccgcgggcgtgggcgccagggaaagatccacaatgccgaacggcacattcagccgccgggacgcttccagcgccacgagctggcccacgcgggtgatgtggaaggccgtgcgcttgatcgtttccgccacttcgtcaaagggccgcccccgcatgccttccagcgcgaccttgaccacgccggggccgctgacgcccacgttgatggcgcaatcgctctcgccgatgccatggaaggcccccgccataaacgggttgtcctccaccgcattgcagaacaccaccagtttcgcgcagcccaggccgcttttgtccgccgtccgcgcggcggtctgtttgatgacgtcgcccatcatgcgcaccgcgtccatgtcgatgcccgcgcgcgtggaacccacgttgacggaggaacacaggtattcggttgcgctgagcgcctcgggaatggattcaatcagccgctggtcggccgcggtgatgcccttatgcaccagcgcggaatagccgccgatgaaatccacgccagtttcccgcgcggccttgtccagcgcctgcgcgactttggccggatggcggatcgcgccggtaatcagcgcgaccggcgtcacggagatgcgcatgttcacgatcggcacgccgaattccgattcaatggcgcggcccaccttcaccaggttttccgcctggcgggtgatgcggtcgtacacgcgtacgcacagcgcgctctcgtcgtcgctcacacaggacagcagggaaatgcccatggtgatggtgcgcacgtccagcttctggtggtcgatcatttgcagcgtctgcaggatttcagaggtagtgatcatggcgcgctgtccctcctaaatctggtgcatcgcttcgaagatttcgctgcgctgaacgcgaatctgcacgttcaaccgtttcccttcgtccgccagcgcctggttcagcctgtcgaaatcgcaatgttcgctggatatatccgcgatcaggatcatgctgaacaggccggacacgatggtctgcgaaatatccagaatgttcacgtcatattcgtacaggatccgcgtcacgttggcgataatgcccttgcggtcctcgccgagaatgctaataacggcctttttcatttcctccattggattctgctctcccctttgtctccattcataaacgatggtatgccctgcgctaggccttttcttccaacagttccgccagttcggcccactcgtcgtagagcgcgtcgagcgtttctttcgcgcgggcgtggctctcggtgagcgcgcgcccggcctcgggatcctgccaagcgcccggcgcggccatttccgcctccaaccgggcgacttccgcctccgtgcgggcgatttccgcttccgccgcgcgcacgcggtcttccagttgccgccgcgattcgcgcgccagccgctccttgcgcttcaatttgtcgcgctgggtctgcgtcaacccatcggacgccgcttcctccggcaacagcgcggcgcgctttttctccagataatcgtcgtaattgcccaggtattcgctcacgccctccgcgctcatttcgatcacgcggttggccacgcgattgatgaaataccggtcgtgcgaaacggccagcagcgtgccgtcgaaatcgtccagcgcgtgttccagcacctcgcgcgagtccatgtccaaatggttcgtgggctcgtccataaacaggaggttgtccttgcgcagcatcagcttggccagcgccagccggccgcgctcaccgcccgaaagcgtgtggattttctggaacacatcgtcgccagtgaacaaaaacagggccagcacgccgcgcacgcggtcggcgtccaggcggggaaaatcgtcccacagttcgttgagcacatccttatccggatggaggcccgcctggtgctggtcgtaataaccgatatcgacgttcgcgccaaacttcatggtgccgccatccgccgtttcctcgcccacgaagatgcgcaaaagcgtggtcttgcccacgccgttggggccgatcagcgccacgcggtcgcccgcgcgcaaatgcaggctgaaatgctcgaagagcttcctgccatcgtagctcttgctcagatctttggcgatcagcacatcctcgcccgtgcggcggcgcgcctcgaaggaaaagcgcaccttatcctcgctcacgggtttttccaggcgcacgattttttccagccgcttttcgcggctttccgccgccttgatggatttttcgcggttgaacatgcggtagcgcgcgatgatcgcctcctgccgggcgatttccgcctgttgcagcttgtattccttgagctggcgctctaggttggcctggcgcttgcgcacgaacgcgtcgtaattgcccgaatagcgcgtgagccgccccatggaaagctccgccatgcaatcgcacaccgcgttcaaaaaatagcggtcgtgcgaaatgacgatcaccgtgccgggatactttttcagcgtatcctccagccagcccacggcggcgaggtccaaatggttggtcggctcgtccagcatcaaaatttccggctgcatcaaaagaatgcgcgccaggcacaggcgcgtcttttccccgccagaaagcaggcgcgcgggcatatcccgccggtctttggcaaaccccagcccggccagcacgccctgcacccggctgggccattcgtagccgcccgcgtcctcaaagcggcgggtgagtttgtcgtattcgttgctcaggcgggcaaaggcctccgcgtcctcgtgggcctcggccatttcagcctccagcgcgcgcaggcgcttttccatcgcgatcagcggatcgaacacgcgcgtgagctcctccatgatggaaagctcgccatcgatgtccgcgtgctgggtaagaaagccgatccgcgcgtccttggcaatggaaatttccccgccgtcggatggcatatcgccgttgatgatcttcagcagcgtggttttgccgctgccattcacgcccaccaggcccagcctttcgccctcctgcagcgcgagcgtcgcgtctcggatcacttcgttggtgccgaatgctttgcgcacggcgctcaaggataacagtaccatatcttcctcccgaaattctgtaaacgcaaaatcaaggccaggcaggccgtggtcccggcgcggtgaaccttgccctttattataccagatattcggttaagagaaaagctttgcgcgggcaaatccggcaaccttctattcttcttccgcgagctgccagccgcaatcgccgtgataaatcatcaggcgcgtcatgccgccatcgatcacgatggtttcgccggtgataaagcccgccttttcggagcacaggaacagcgccatgtgggcgatgtccatggggttgcccacccggcccgcgggatgctggcgcgcgtccggcccggcataaacgcggcccgcggtgtcgatccagccaggggcaatcgcgtttacgcgcacacggcccgcaaggctggcggccagcgcgtgcgtgagcgcgccaatcccgcccttggccgccgaataactctccgtctgcggctggctcatgaattcgcgcgtggaagagatgttcacaatggccgcgcccggcgcgaaatgcggcaaaaatagcttggtgaggtagaatggcgcggccacgcccacccgcaacgaacacagaaactcctcgtaagaacaactgtcgatccccttcatgggcggcggcgcgttgtgaatcagaaaatccacccggccaaaatcggcgaccaccttggcggcaaagcgctccagcgcgccttcgtcgcctacgtcccccacaaaatagggattttcctgcacgtcgatcacggcgacgcgcgcgccgttttgcgcaaattcccgcgcgatcgcccggccaatgccctgcgcgccgcccgtcacgacggcgacctttcctgcaaacatgctctttcctcccctcgggcgctttgcgccgttcagactgtcgaaaaaccaaagagaggggcaaagccctttcgcacttcaatcgtccccggcggcgtgtacggcgggggcgcacgaagcgcgcgccctgtgggcgaaacagcgcgaagtaagcccaatgaagcagggagtgccgcaagcgagcctgcgagcgcagtgggacgaccatgctgaattgaggggtgcatggattcgcaatacgccgcgtcggaaaatcccattttccagagcaaaaatcgcttccttgcagtttccgcgcccg

SEQ ID NO: 4498 - DNA, 6015 bp, Unknown
  16S sequences of unknown bacteria
cgcgttcaacgccgacttcgacggcgaccagatggctgtccatgtcccgctgtccgccgaggcccaggcagaggccagaatgctgatgctctcggccaataacctgctgcgcccgcaggacggcaagcccgtcacggtcccaacgcaggatatgatcctgggcacctactacctgacctacgtccgcgaggacgagccgggcaatggcagctacttctcctcagtggacgaagtcatgctggcatataaggaccatatcgtcggcatccatgcgcccatcaaggtccgcgtggagcggatgatcgatggcgttaaaaagtcccgcgtcatcgacgcgacagttggccagctcattttcaacgagccgatcccccaggacctcggcttcaagaagcgtgagacagaggacgacatgttcgacctggagatgacggataccgtcggcaaaaaactgctgggcaagatcatcgaccgctgcatccgcgtccatggctttaccattgcgacggaaatgctggacaaggtcaaggctctgggctacaaatactccacccgcggcgccattaccgtctccattgcggatatggcgatccccgagcggaaatatgagctcatccacgaggctgaggcagaggtcgtcaagatcgaccgccagtataagcgtggctttatcaccaacgacgagcgctatcgcctgacggtcaagcagtgggaaaagacgatcaaggacgtcaccgacgcgctacaggacaacctggaccggttcaaccccatctttatgatggcagactccggcgcccgtggttccatgaaccagatccgtcagctggccggtatgcgtggcctgatggcagataccaacggccgcaccattgagatccccatcaaggcaaacttccgtgaaggcctgtccgtcctggaatacttcatttcctcccgaggcgcacgaaagggcttgaccgatacggcgctgcgtacggccgactccggttacctgacccgccgtctggtcgacgtctcgcaggaggtcatcattcgcgagcctgactgcaagacgaaggagggcatctggctgggcgcttatatggaaaagggccaggtcatcgaatccttcgcctcccgaatccacggccgcttcctggttgaggacctgtacgacagcgagggcaacctgctgcagtccagtgatgtcatgatgcagccggaggacgccgaccgcttcgaggctgccggaatccacagagtctattgccggacggtcctgggctgcaaggcccgcagcggcgtctgcgccaagtgctacggcatgaacctggcgacgtctgagctggtcaatttgggcgaagccgtcggtatcattgcggcccagtccatcggcgagccgggcacacagctgaccatgcgtacgttccacaccggcggcgttgccggtgacgatatcacccagggcctgcctcgagtcgaagaactgttcgaggccagaaagcccaagaagatggcgacgatctccgagatctccggcaccgtcgagatcgacgagacccatcgtaccgccctgcgcagcatcaccgtcaccggcgaggacggcgaggtgaagctctaccaggtgccgtactccgtcggcctgcgggtcgaaaacggccagaaggttaacaagggcgaccgcatcaccgatggcgccctctcgccgcatgacgtgctgcgtatttccggcgtggaagcagtccaggaatacctgacgcaggaagtcctggctgtgtaccgccagcagggcgttgatatcaacgataagcacatcgaggtcatcatccgccagatgatgcggaaagtccgggtcgaagagccgggcgatacagatctcctctccggcactgttgtcgacgctttcgagtttgacgatgccaacgccaaggtccaggcccgcatcgacgcgggggagacggatctgcagctggcgacgaagtccctgatcctcatgggtatcaccaaggcctctttggcgacggaatccttcctctccgctgcctccttccaggagacgacgaaggtcctgacggaagccgccatcaagggcaaggtggatcatctggttggtttgaaggaaaatgtcatcatcggcaagcttattcctgccggttccggcctgtcggtctatcgcgatttcgagatcgtcgattcccccgaatccccggtcaccgaagaaatgatcacccaggagcagatgtaagctgccccgcaatcgctagaaaaacgcccgccgcagagcttctgcggcgggcgtttgagactgaaaaaagcctcgcagagtttgcgccgcgcacggcgcaaataaggtcaaaattattttctccggcggcgtgtacgtcggggaaaatactttacgccctgcaagtgtggaatttctgcgctgaaagcgcagaaattatgcgcgcagcagggtgcaattccctcaaacgcgagcccagcgaagcgggtcgtgtttgagcgcgtgtcaaaatactttttgacacgcgcaagcgcccgccgcagagcttctgcggcgggcgtttggcggtgctaggcaatgcttgcgggaaaaacataccgccggggcaagcatttgccccggcggtacgtgcgaacgaagaaaagaaacggtgaacgtattatttgactcttgcttccagatccttgatcgtcttgcagatgagctccgcggacagatcaatgcccagggtgcctgcgtcaataatcaggtggttgttggtgatatcaccccaggtctggccggagtagcggttgtagtagtcggcgcggatcttatctgttttatgaatcagctttttggccttgtcagcgctgagactgaagatttgcatacagcgggcaattcggatttccaaatcagcacgaataaagacatgaagcacatggtcaaaatcccgcagggcgaagtccgcgcagcggccgacgaagacggccgggcccttttttgcagcttcctggataaccttgaactgggtctcagcaatgcgaacactgggagagagcagcagggaagggtcaccctcgtaccacataacgttgtattggaacgcgccggactgcagatagctgacgggcttctcatcatggctggcgatgatgtccttgttcaaattcatcatttctgcagttttatcaataatctctttgtcgtaatatgccatgtcaagggcatcggcgacctgctttgctgtctcaataccgccgctgcagaattcacgacctacggtgatgcaatattttctttccatattataacgctcctttttatgtatttttgatcgttttatactgccggtgctattgccagcgctccagcagatttttgatttggcttgtgaattttgctagttctttgttggattgccctttgctgcgcttggccacatccagcagctgctgggcggcctgcacaagggtgtcatagaccttttgcgtccgggcgtggcccttgagctcaatcttccggccttcggtatagacggtcagcttcccggcggccaggtcgaaggctgtcccgctgaagggggcgatggcggtgacgccgaattgcgtttgcagcagattccgcagggtctcgcaggcgtcgtcctcaccatggttgacgaagatcacaccgggcttctttttgaaagcctctacccaatgcagcaggccctgctgatcggcgtggccgctggtgccatgcagtgcgcaaatctcggcctggacggcaatctcctcaccgaagagcttcacagtctgcgcgccttccaaaagcgtgcggcccaaagtcccggcggcctgataaccggcaaaaagaatgatattacggcgctgccacagattgtgctttaagtggtgccgaatgcgtccggcctcgcacatgccgctggcagagagaataacctttggcctgcggtcctcgttgatctttttcgaatcctccgcagtgacggaaagctgcaggtctgcgcaccagatggggttaatcccctgggccagcagggccttcgtctccgggtcaaagtagtcgctgctgcattgcatgaagatggcagttgcctcttcggccagcgggctgtctaaataaatggggaagccatcgtggtagtgaaccatatttttctgcttgatctcccgcagggcgtacagcagctcctgtgtgcggcctacggcaaaggaggggataatcacgctgccgccccggtcaaatgcccgctgcaggtactgggccagctccgcgacagcgtccttcggacggtcatgtaagcgattgccataggtcgattccagcaccaggtagtccgcttcttcgacggattgcgggtcgtttagaattggatgatcaagattgccgacatcgccggagaagacaattttcttttccgtattaccctcctgcagccagatctcaatgcatgctgagcccagaagatggccgatatcagtgaagcggatctgcacgtcgtcggagatggggtagcgcttggcgtagtcgcaggggtgaaacagcttcatgagcccagcgacgtcctcaaccgtgtagaggggctcctccggcggctccccggcccgctgggccttccggctgcgccattcggcttcaaagctctggatgttggccgagtcccgtagcatcacgtcgcatagattccgggtgacctccgtcgtatagacttgcccgcggaagccgtccttataaagcttgggcagcaggcccgagtggtcgatatgcgcgtgggtcaggaatactgcgtcgatgcgctggggcggtacggggaggggaacgttttcgtagacattgacgccctgctccataccgcagtcaatcagataataagcgccttggttttccagtaaagtgcagctgccggtgacttcatgggcagcgccgataaaagttagctccatggcgatctccctttcgaataccaaatcaaaacacgaatgcacgaaaaacaccgcgcatccggtcagcctctgtctgctgagcctatgcacggtccatcaaatatacctggtctggatgaaatcgtgcactgctacgcatgattctaagcgccgttccttttatattcctagtataacacggggttatcgaatttgcaatgactagtttatacagcagttttgacaaaaaacacagaaaaaattgtggaaggtggacaaaatcatgctgcataccctagcttgtggaggtgttgctatgctttccgcaagcatctggctggtctttgccggcctactgtattcgctccgcctgggtgcgggcggctctttcccaaagccgctggatgcggccgaagagcgaaaatatctgtccctggccgccgcgggagacctggaggcccggaatatcctcatcgaacgcaatctgcgcttggtggcccatatcatgaaaaaatactacacccaaactgccgaccaggaggaccttatctccatcggcaccatcggcctgatcaaagccatctccaccttcgacgccaccaaaggcgcccgcctggctacgtatgcatcgcgatgcattgaaaatgaaatcctcatgcatttccgggcgcagcggaagtcggcgggggatgtttcactgtcggattatattgagacggggaaggaggggaacgccctttccttgatggatgtggtctgtacagaggaggacctttttgaggacttggagacgcggcagacctatctgcggctgcaccggtatctgcgcagtgagctgacgagccgggagcagaagatcttgatcctgcgttatggactgggcggaaagcccccgctgacccagcgggagacagcgcagctgtgccggatctcccggagctatgtctcacgcatcgagaagcgggcgctggaaaagctgcaggcggcgttttcccgagagatggcaggagaataaagtgtgcccgccctgcgatgatgcgaggcgatcgcggggcgggcagaacagagtagcttagagcagctctatcggcggctgctctcggttaaattttccggtca

SEQ ID NO: 4499 - DNA, 32759 bp, Unknown
  16S sequences of unknown bacteria
atatatctattctaccatagaaggctctttttttcaattgtccgttttttacggacttgtgcaaaacaacccaataaaagggctgttttttatgttttaatcccttgcgggataaatcgtgaagccgaacttgattgatttttcagaaagtcggtatttttctccgagttcgggaccgcaggagttggagccgagtcccgaatttttgtaatctatgcgcagatgcgttttttcgtccgatacaagttcgtccgtgtgcgtggcgcggaaaagagcttttgatgagtattttgaagcgttgaactcaaacccgtcgggtgaagtgaagataagttttccgattttaagcatttttgtcgcaaaatggttaccgtgttcctgcggcatgacatatttcacatattccttgtccgtgtcgctttcgtaaagtcccacgcaagcccaacggtgcatatcgcagtaactttcgatgggtcccgaaccgtagtaagtgaaattgtttttctctcccgggagttcaaactcaaagccaaggcgcggcagccaatatgcactttcacggattttgcagtcaagcgaaaatgtaatttgcccgtttgcggatattccgacaagaagtttgtaatgcagcagaggaactctcgaaacgcccgcaagtgagcctgtgactgcgattttaccgtcggaaacggtgcaggaatacactttcgaaaaagtgcagtcaaggttttcgccctgccgtccgttcgagtttatccaaaggactttgatataccgttcgttgtccgtcggggcacggaatgcggaaagcacggttttgcccgcaagttgctcgtctccgccgatttttatgcttgtaaatgcgccgtaatgttttgaaaaaacatacgaaaagccgtcgcctgctgcatagatattttttccgtcttcttcaagttgtgctgtcggaatctgttcgtttctggcggcttcaaacggaatatcatgttggcatttggcgtattcaacgccgccttttgtcagagaaatattcagatgtgcgccgtagatcgccgttattttgggcatagagatgtctattgctgcggtttcgtgcgggttcagtaataacgggattttttccgttttcagaatttttccgtccgcttcaacggaataagaaaagtcgtattcgcaaaggtttgtgaagtcaagtcggttgtaaacggtcagtttgccgttttcatacgaggttcttatgggctgatatgcggcttttgcttcataagttcccgctttgaacgtgcggtctgcaaaaacaagtccgtcacagcagaaatttgcgtcgtttgtcagttctccgtcaaaatcgccgccgtatttttacacgccgttttccgtcactacatgatccgcccattcccagatacagccgccgataagtttgggataacggtcaaacagttcgttgtagtcccaaacgtctcccggtccgtttcccattgcatgagagtattcgcaaagaaaaacgggcatatcaacggcgctgtcgttcgcaagttcttcaacccgttgcagcggaagatacatttcggaataaacgtcggggttgtgtatctcgccttttcgggaagcgtcttcggcgtggagcaggcgtgaaccgtcacgcttttttgttgcccgtatcatttcaacgtggttctctccgtgtccgctttcgttgcccgttgaccaaaaaatcacgctcgggctgttcttgaacgtttcgaccatacgttccatgcggtcaagaaattcgtgtttccactcgggttttgtgcagggccaatcgcccgattcggcatcgtaagcgcccgtgccgttaggtatgcggtagcaagcgccgtgcgtttcgaggtcggtctcgcagacaacataaaagcccatttcatcacacatatcaataaatttcggcgtcggcggataatgagaagttcttatgcagttgatgttcagggatttcataagcgtgaggtcttttttcaattcttcgtcgctctgacaccacccgcgcagttttcccgtgtcgtggcggtttatcccgtgaagtttgacgggaactccgtttatgagaagttcgtatttgtcggagatctcgattttccgaagcccgacttttcgctcgatgacttctccctcccgagagagccgaaccgtgtaaagaaacggcttttccgcattccaaagaatgggtttttcaggcgtgaaagagaatttttcgcctatatcgccgtcaaaaagcaaagtgtcaccatcaaagatttcaaggtgcgccccgccctcgaccgaaacggtcacgctttcgccgttcggtatcaattcaaagtcgcggatatggtttttcggtctttgcagaatatacacgtcgcgaaagattccgttgtaacggaatgcgtcctggtcttcaagataactgccgcagcaccatttcagaaccttgaccgttacggtgttttcgccctcggtcacaaagtcggtaatgtcaaattccgcttgcagacggctgccctgcgtgaacccgacatatccgccgtttacataaagaaacgcgcaggagcaaacaccctcgaatacagaatacacgcgcccgaatttttttgcgatatcgaaagtccgacggtatatcccgcacgggttgtcgtctggtacgaaaggcaggtcatacggaaacggataatttatgttcgtataattggggtgtccgtaaccgcagagctgccaacaggacggcacggtaattttgtcccaattctctataacttcgggaacgtctgtatcacgctcgaaatatgcgaaatcccattcgccgttcaaaagacgatattcggatattcctttcgggatacagtaacttctcggcggcattctgttttcgcttgttttttcggggttttcgtaaattctcaaatcgctctctcctgaataatgtaaacggttttttatgttggtttcatcttatcacagaaatccgaaaatgtctaccgtatttctcaaaaaaaattattacggcagcaaaaaggagcggcaatggtgttacgcctttgtcgctccgcttaatttttgttttttgtgattatttactgtaaacttccggtttgagaacgcctatgtacggcaatgcacggaatttttcgtcgtaatcaagcccgtagcccacaacaaattcgtcggggattatcttgcccgtgtaatcgggtgtgaagtcaacgacgcggcggctcggtttgtcaagcagggtacaggtcttgacggagcgcgcgcctttcagtttaagataatctatcagatacgaaagtgttctgccgctgtcaatgatatcttcgataacgataaggtcgcattttgcaaggtcttctctcatcaggtcgagaattatgttgacatgaccggaagaaacggtctcgccgccgtaggaagaaactcgcataaagtctatttcaacgggtatcgtcagttttttcatcaggtcgcccataaagaccacggagcctttaagaatgcagacaaggacaagttttctgtcttctcccgaatagtcgatgtctatctcgtgcgcgatacgcgaaacgatttcgttcagttcttccgtgtctataaggactttttcaatttcgtttatcatattttcttatcccccgaatctatctcttaaaaaatattatatcacagagtgattccgttttcaagtgttgtcgcagattttcaaatatttattacaagcaggacagcaaaaacgtaaaccgttttcaaccctttttgctgtccgtgcatttttaacatccttgtcaatgccgttcagacgcttttcggcagggttgagcgcagatccccgatatgttcgtcgtaaccgagcgtttcgagacggaagccgttttcgccgtgatatgcgactgtcacggaagcgtttgacgcccaatcgagttctttcattctttcgacgggaagtcccgagatgaacgtagtcatcgagcgtatcgccgcgccgtgcgatgtcagaagtaccgttttgccctcgtttttgcgaacaatgtcttcaagcgcttcggaaactcttttatatacgtctttcaggctttcgccgcccgtgcagactgcgtttccgatgtcttctttccaaattcggaaatcgtgtccgtacttctcctcaacttcggtaaacggcatattttcccattttcccgcatatatttcggcaattctcggctctgtttcgatttcaagccccggatgaaatgcgactatttcgcggcatgtgtcaagtgctctgcgaagcggacttgaataagcggcgtcaatctgttcgcttttcagaaattcgcccgtcaaccgtgcctgttttacgcccgtttcggtcaggtcgaggtcggttctgccgaggaatctccgtgtcagatttcccacgctctgcccatgtcggactattataagttttgtctcttttttgctcatttcattctctccgttcaacgttgtaacactatgataccactcaaaagagagaatgtcaacgacaaaccgcgaattttgtccgaaaggtattgcaaaaagataaaaaatctgatataatcaaaacggaatttttataaaatataattaaaataatataaccggaaaaggagaagaacactatgggacttatcaaagccggaataggcgctctcggcggaactcttgcggatcaatggaaagaatttttctactgtgaggcaatagataaggaagttcttgttgtaaaaggacaaaaacagataacggggcgttcctcgaacacgaaaagaaacgataatataatttccaacggttcgggtatagccgttgccgacggtcaatgtatgataatcgttgagcagggcaaggtagttgaagtctgcgccgagccgggagagtttacatacgattcgtccaccgaaccgagcatttttgcgggcagcctcggtcaaagcatcaaagaaaccttcaaaacgataggcaaacgttttacttacggcggcgatacgggcaaagaccaaagagtttattatttcaaccttaaagagataatagacaacaagttcggaacgccgaatcccattccgttccgagttgtcgattccaaaataggtcttgacgtggatgttgcggtgcgttgctcgggcgtttattcttataaaatagcggatcccctgcttttctatacgaatgtttgcggaaacgtagcggacgaatacagacgcgacgaacttgacggacagttgaaacccgaatttatcagcgctcttcaacccgcgttcggcaaactttccgaacttgaactccgtcccaatcagatagttacgcacaacacagaccttgaaaatgcgatgaacgaaacgctgaccgccaaatggggcgaactgcgcggacttaaaatcgtcagcattgcgctcggttcggtaacgcttccggacgaagacgcggagatgataaaacaggcacagcgcacggctatcatgcgcgacccgaccatggcggcggctactcttgtgggcgcacaggcggacgcgatgaaagcggcggcttcgaacgacgccggtgcgatgaccggctttatgggcatgggcatggcgatgaacaacggcgcggcgggaaatgcgcagaatctgtttgccatgggtcagcagcaacagcagacacagcaggcggcagcacctgccggcgatacatggaaatgtgcttgcggcgcgacagcgagcggcaaattctgcgcggaatgcggcgcaaagaagcctgaggcttcgacttggacgtgttcctgcggcgctgtgaacaacggcaagttctgcacttcctgcggcgccaaaaaacccgagaccgttcaatgcgcaaactgcggctggaaacccgaagacccgacagaggcaccgaaattctgtcccgaatgcggaaccccgttcaataaataaggaggtcttctatgtccaccttgctcgaatacaaatgtccgtgctgcggcggcgcgatagcgtttgacagcgcatcgcaaaaactaaaatgcccttactgcgataccgaatttgatgtcgaaacacttaaatcatacgacgaggatcttaaaaaagagacccccgacgatatgaagtggcagaccgaagccggaaaagagtggcaggagggcgaagccgagggaatgcgcgtttacgtctgcgattcctgcggcggcgagatagtctgcgacgaaaacacggcggcgacgagttgcccctattgcggcaaccccgttgttatgaaaggcaatctcaaaggctttttgaagcccgattacataatcccgttcaaactcgataaaaaggctgcaaaggcaaagttcttcgaacatctgaaaggcaagcgccttttgccgaaagtcttcaagagcgagaaccatatcgatgagataaggggcgtttacgttccgttttggctgtttgattccgatgttgacgcgaacattcgttataaggcgacccgtgtcagaacttggagcgacagcgaaaacgattacacggaaacaagttactatgccgtttatcgaggcggtaacatcgcgtttgaaaacgttcccgttgacggctcgtccaaaatgcccgacgatctgatggaatccgtcgagccgttcgatttcggagaagcaaaagagttcgcaacggcgtattttgcgggatatcttgcggataaatacgatgttgacgcggaacaatccgtggaaagagcgaacgcaagagtcaagagcagcaccgaacaggaatttgcaaagaccgttacgggctatgcgtccgtgactaccgagcagagcagtatcaaactttcaaacggtgttgcaaaatatgcgatgtatcccgtctggattctgaacacgacgtggaaaggtcagaagttcacgtttgcgatgaacgggcagaccggtaaattcgtcggtaatcttcctcttgacaaaggcgctttcttcaagtggtttttcgctctcggcggaatattgagtgctgcggcactcgccgtttcgtatctgatttggttgttgtgaggaggggttcaagatgaaaaagaaaatattgtctctgatactcctgcttgcggtcatgttgagttttgctctgcccacgtttgccgcctatgattttgatgaaatcagaattattgacaatgcggacttcctgacggaagccgactatgcgacggtttatacaaaactctgcgacgcatcgagaaaatacggtgtcgaacttttcatatataccgaaaaaagcaatgttgaagagactgacgaaaacataaaccgctatgtcagaaatctttataatgagatatttgacaatgaagcgggaaaagactgtgttatcctctatgtgatagacgacaccgcagaacttgacctttcgtgcatatattccaacggcaaagcaaaagccgcagtcaactttgacgcacaggaacgtcttcgcgaaacgcttcgcgacggcggaaagtcggacagatttgtcctttatgccgatgaatgtataagactgctcgatctttatgagtcaacgggcaaagagtataaagaaccgttcggttggttcggcgcaattgtactcagtctcggaataggctttattatcgctcttatagttgtcctggcgatgaagggcaaacttaaaaccgttcgtttcagcaacaatgcaacggattataccgttcccgacagcatgaacgtgaccgacgaaagagaactgtatctttacagcaccgttgtggcgactccgaagccgaaagaatcagattcatcatcttcgtcatcggattcttccgacggcggaatcagcagttccggcagagtgtaaggctttctgtttatctaaatttaaaacataacaaacgcctgcgttacagtcgcaggcgttgtctttttttttctctccgaacggctcattttcggcagaaacggaaaatatttcattcgggtattgactaaaacatacttttatggtatacttacggcgtaaaagaagataatagacttgaaacaatgcgatttcaagcgaggggtgagaagaacggataaatacaatataaccggaatgagttgcgcggcgtgcagcgcacgcgtggaaaagactgtatcggcgctgaaaaatgtcgatgaatgcagcgtaaatctactgacaaattcaatgacggtttcgggaaccgcaacggaagacgaaattgtttccgcagtcgttgctgcagggtacggcgcatcgaaagtcggggcaaaaaacgacgctgcgcccgcaaaagaaccgctgaaagatgaaatgacgcctaaactccgcaaaagactttttgcgtcgctcggttttcttttggttttgatgtatttttcgatggggcacatgatagggcttccccaaccgcagataatcgaagatcatgcggcggtcggcggacttatccaacttttgctgactgcgatcatcatggtaataaaccaaaaattcttcatcagcggcgttaaaggactgcttcaccgcgctccgaatatggacacgcttgtttcgctcggtgcggcggcgtcgttcggttacagcacatatatcctgttcaaaatgatagttttccccgagcaggcgatgcacctttatatgcacgaactttatttcgagtccgcggcaatgattctgacgctgataacgctcggcaaaatgctcgaaagttattcaaagggaaaaaccaccaacgccataaagggactgatggaacttgcgccgcgtaccgcaacgttgcttgttgacggcaaagagacaactgttcccgccgaacaggttaaaaagggcgatattttcatcgtcagacccggcgaaagcattcccgttgacggagtggttcttgaggggcacagcgcggtggacgaatctgcgctgacgggcgaaagcgttcccgtggacaaagacgtttcgtctcccgtttccgcggcaacggtcaaccgttcgggcttcatcaaatgcgaagcgacacgcgtgggagaagataccacgctttcgcagattataaagatagtcagcgacgctgcggcgggaaaagcgccgatagcgaaaatcgcggacaaggtttcgggcgttttcgttcccgtcgttatctcaatcgcggtcgtaacgcttgtcgtctggctgcttatcggcaaagacataggcttttctcttgcaagagcaatatcggtccttgtaatcagctgcccctgcgcactcgggcttgcaacgcccgtggcgataatggtcggcaacggcgtcggcgcacgccacggaatccttttcaagaccgcagaagcgcttgaacaaacaggcaaggtaaaaaccgtggttctcgacaaaacgggaaccgtcacgcgcggcgaacccgaagtctgcgacatagttccctgtgcgggaacagatgtatcgtccctgctttctgttgccgttacgcttgaaagcaaaagcgaacaccctcttgcaaaggcggttatgaaatacggcaaggaaaacggcgtcaccgttcgcgaaacaaccgatttcgaagccgtggcgggtaacggactgacggctctttcctacggaaaacctctgttcggcggcaaacgcgaatttatagaaagcaaagtttccgttcccgaagatatgaaagcaaaagccgacgcgcttgcgtccgagggcaaaactccgttgttttttgcccgtgaaaacggtctttgcggaattatcgccgttgcggataagataaaacccgacagcgcacaggcagtcgacgctcttcaaaaaatgggcatccgcgtggtaatgctcacgggcgacaacgaacgcaccgcacaggcggtaggcaaacaggcaggagtcgatgaagttatcgcaaacgttcttcccgccgaaaaagaagctgtcgttacccgcttgaaaaaggacggcaaagttgccatggtcggcgacggcataaacgacgctcccgcgctcacggcagccgataccggcatagcgataggcgcaggcaccgatgttgcgatagacgcggcggacgccgttttgatgaacagttcgctttcggacgtgccgaaagccataaaactcagccgcgcaacgctccgcaatatcaaagaaaatctgttctgggcgttcatttacaacacggctggcattccgcttgccgcaggcgtattcatctccctgctcggctgggaaatgaacccgatgttcggcgcggcggcaatgagcctttcaagtttctgcgtcgttatgaacgcactccgactcaatctgataaaactcggttctccgactcactcggaagaacccccaaaaacccccgaaaaggagacgatatatatggaaaaagtattcaacgtaaaaggtatgatgtgcccgcattgcgaggcgcgtgtaaaacagagtgtcgagagcctcccgcaggtcgcttccgctgtcgcggaccacaaaacgggcaccgtaacggtcaccctgaccgaggccatcgccgacgaagccatcgagcaggcgataacttcacagggctacgaagtggtctgatattcattgtttttaaaggacaccttgcaaacggacggccccgtgcgtatcggctgcgatattgtctgctgttcattgtttttccgcagatattttgttgactaagagaacggtgtttgtctgacgcaaagttgtctgctgttcaatgttctaattgcaaaaaaaatcttcgagattacctcgaagatttttttatctcattgtatacccgaaaactatttcacgaaaaaataagttcggataatactcttttggtggagacgatgagactcgaactcactacctctacaatgcgaatgtagcgctctcccagatgagctacgcccccaagcgcttataaagtatagcagattttttgtcgtttgtcaataccgccgcaaaataaatttgaaaaggaaacgcaaattttcgtgacggtgtattcggtggctgtttttcggtgcaattcacgagttcggtttttttctcgataagcgctttgactgtttcaaaatcgttttttcgtattgcaagaaaaaagttttttcatcgggcatctccatttaaaaaaaacagaaaagtcggcttattttccctttttcttatttattgcccgtgcgatgagtttttcgagttccacaagcgggattatcgccacggcgagcgcgagggcaacagcaaattcgttcaggcttattgtttcaaagccgaacgccgttgcaaacgcgggaacgaatatgacggcggaagtcagaacaaatgcgagcagtagcgaaccccagagccagccgttctgcttctttatcgtgaacacggagcgttcgcgggaacgcatattgaacgcgtggaaaagttcgacgagcgaaagcgtcaaaaatgccatggtcatgccgtcgggactttcggttatttcccattttcccgcttccataaagtgccctacaaagtaggatacaaacgtcagaagcgcgataaaaaagccttgaattgcaacgcccgcgccgacaccgtttgagaatatgccgtcttgggaatctctcggcggacgtttcattgcgtccgcttcgccgcgctccattccgagcgcaagggccgggaagcagtccgttataaggtttatccaaagcaggtggacggggttgagaatagtgaacccgagcaacgatgccgcaaagacggaaagaacttccgccaagttggaagcaagcaggaactgtatggcttttcggatattgtcgtatatcctgcgtccctcttcgactgcggagacgattgttgcgaaattgtcgtccgccaataccatatcggcaacgtttttcgtcacatccgtgcccgttattcccatgcccacgccgatgtcggcgttctttattgaaggcgcgtcgttgacgccgtcacctgtcattgccgtaacttttccgagcgcgcgccacgctttgactatgcgcactttatgctcgggctgaacgcgggcatataccgaataatccttgactctttccgcaaaatcttcgtcggaaatatcatcgagttccgcacccgttatcgcctgcgatgcgtcggtgattatgccgagttctttggctatcgcaacggcggtatctttgtggtcgccggttatcataacggggcgtatgcccgcttcacgacactcggctatcgccgctttgacttcgggacgtatcgggtctatcatgcccgaaagacctatgtagcagaggtcgttttcaagttccgcgggttctgtatttgcgggtttttctttatgttcttttttcgcggcgcagagtacgcgcagcgctttgtccgccattcttttgttttctgcaagaatcttttcgcgaactttttccgtcatcgggagttcttcgccgttttcaagataatgcgtgcaatgtttcaacacttcgtcgggcgcaccctttgtgaattgcacgatatgcccgccgttttcgactacgacgctcatcatttttcgcattgagtcgaacggcgcttctccgatacgtttgtatccgtttatactgtccgtcagtccgagtgaaattgcgtcgttgaccagcgcacattcggtcggttctccgaccgcttcgccgttttcgccctcttttgcgtccgagcagaccgccattgcagttgcaagcaatttttcatcgtcggacgagcgctcaacgaccgtcattttattctgcgtcagcgttcccgttttatccgaacagattatctgtgtgcagccgagcgtttcgaccgccgtcagtttgcggataacggcgttgcgctttgacatcttggtaacgcccatcgaaagcactatcgtaacgaccgccgcaagcccctcgggaacagccgccacggcaaggctgaccgcgaccataaatgttttgagcaatgcgtcgaacgtcacattgggcacgatgcgcagaatatccaccgcaaacacaacgacgcatacgcccagcacgagtacgctcaaaatcttgctgagttggttcagtttcttttgcaggggagtgacttcatcctttgcggcggcgagtgcgcctgcaatcttacccatttcggtatccattccgacggctgtcacaaccgcgacgccgcgcccgtatgatacggaactgcccatgtataccatattttttctgtcaccgagcgggacgtctttttcgccatcggcacagagtttttcggcgcattttgttacgggaacgctttctcccgtcaacgcggattcttccgctttcaggcttgcctcttcgataaggcggcaatctgcgggaacggcgtcgcccgcttcaagcaatacaacgtcgccgacaacaaggtcttcgctcttgaccgttacgggtcttccgtcacgcaaaacttttgatgtcgccgccgtgattttttgaagcgcttctatcgctttttctgctttgctttcctgcacaacgccgagcaccgcgtttatcagcactaccgcaagaattatgaaaacatccgtgaacgattcgttttgaagcgctgcggtgacccccgaaacagccgcagcgataagcaaaatgattatcatggggtcggcgagttcggcaaagaattttttgatcacagagggcttttttgcttcggcaagtttgtttttgccgttcttttcaagacgcgtttgcgtctctgccgaggtcagtccgtttgcagacgaacctatgtccgcaaacacttcgtcggcgcttttgaggtattctttcatcatatcttctccttgcataggctgaatgttcagcataaacgagcaggggcaattccggtgtttatctgttttttctccattcggacggtgttatcgctatcatcagcggcgaaagttcaagcctgccgagcagcatcacaacggaaagcactatctttgaaaatgcggaatagtccgcaaaacttgccgcgggactgaccatgccgagacccggtccgatattgttgaagcaagccgccattgccgagaagtttgtttctatgtcaaagcccgcaggcggggacacgcttatcagcaaaaatccgacgaagaaaaccatgcagtatattgccaaatagtttcccgttccgtgcaaagttgcgtcgtcaactcttttgccgtccatttttgcgatggagacggctctcggatgcacaagacgtttcctttctctgccgaacatcttaaacagcagcagcagacgcgaaatttttaatccgccgcccgtagatcccgcacacgctccgataaacatcagcacaagcagtattgtttttgaaagtatcggccatgcgttgaaatccgccgtggcgtaacccgtggtcgtcattatcgaggagacttggaacgccgaaagccttatcgagtccgaaacgctgccgtactgcggaaaaatgtttaccgcaatgaccgccgcgctgacgagcgccaagccgacgtagcagataagttccgcatttctgaaagcggatctgaaacgccctatcaaaatgaaataaaagacgttgaaattcatcccgaacaggaacataaaaatcgttatgacccattgcagataatgattgtaggacgtgatgctgtcagcttttattccgaaaccgcccgtgcctgccgtgccgaatgcgtgaacaaggctgtcaaaaagcggcattccgccgcaaagcaacagtattatttcgaccgcggtcatgcaaatgtagattatgtaaagtatctttgccgtgtttctcatcttcggcacaagtttgcccatggtgggaccgggcatttccgcgcgcagaatatgaatggaacgcgaagaagacgaggacggaagtattgccacaataagcacaagcacacccatgccgcctatccagtgcgtgaaactgcgccagaaaagcagccctcggctcatctcttccacattgcgcaatattgatgagcccgttgtggtaaatccgctgaccgtttcgaaaaacgcatcgacgtaagagtgtatctctccgctcaaaacgaacggaacggcgcctatcgccgacatcgtcagccacgcaagcgcaacgattatgaagccctcttttgcgtatatcaccctgtctttcggacggcagaacgcctgtataagcccaccgagcgcacaggaaccgacaactgtccacaaaaacgcccaaacaacgtttttttctccgtagataacggcgacgataagaggtaacgccataagccccgcttcgagcagaattatctttccgagcagggataaaatcattctcttgttcatttttacctattttaatatatccgagagatcttcgagttttctgtccgcggagataacgacgacacggtcgcccgcaagaatcatatccaaacccccgggaataatggtttctctttgcctgataatacctgcaacaagtatgttctttttcagttcaaggtctttgagcgggatattcgccacttccgaaccggggcgaacgctgaattcgagcgcttccgcttttccgtccatgaccttgtaaagcgtttcaacgttgctaccctccgagttgagcagcgcgcgaacgtaacttacaagcaggtcggaaattgtctttttgggtgagatgatgctgtcaacgccgagtttttccgccatgcctacaagttcttccttgttgactttcggcacaactttcggcacggcgagcgacgaagcaaaaatagagataagtatgttttcttcgtccattcccgtcagcgaaacgaacgcgtccatgcttcttatgccctcttcgagcagaagttcctgttcagcgccgtcgccgcagataacgtctgccccgggaagcgcttcgcagagttcgagacacgtcggtctgtctttttcaatcactttaaccgtgttgccgccgctcaaaagcatttttgcaaggtaatgcgccgttctgctgccgccgagaatcatgacattgcgcgcctgacgctgaacaagtccgagcgcgcgcataagttttgtcagttcgtcgggggaagcgacaagccctatcttgtctccgcttttcaactcaaaatttccgtcgggaatatatactttgtctcctctgagcacggcggttataagaaacgccgccttgaagcgtccgcgcaggtcgattatcctaaccccgttgagcggagagtcctgtttcagacgcatttctatcatttcaagatacccgcgtgaaaaggtctctatcgttgccgcgaacggcagccgaagtatattgtatatttcttttgccgccagcatttcggggtttatcgccatggcaaggtcgagttgctggcacataaaaccgaggctgctctcgttgtattcggggtttcttattctggcgattgtgtgcttcgcgccgagccttttcgcaaaaagacagcacagcatattggattcgtccgatcccgtcaccgcaacgagcagttccgcttccgaaacgcccgcttcgcgcagcacttcgcagtcaacgccgttgccgcagacgcctatgacgtcgtaaacatttgttatctgtgtcacggttgcgccgtcaagatccacggcaacaacgtcctgtccctccgaaacgagactggcaacgaccgattgaccaatctttccgcagccgacaactacaattttcatatctttctcttaccttccgttgttaaaactgctcatcgtctttctgacgtgcgagcgatatgagtatatcagtcatcttttccattgatctgacgggaacgtattcgtgtattccgtgataatttgcgccgccggtcgaaagattcgggcagggaagtcccatttccgaaagccttgcgccgtccgtgcctccgcgcacgggaactattatcggctcaacgccgttttctttcattgccgcttccgcacgtctgatgatgtgcatgtgcggaacgatatattctttcatattataataactgtcttttatctgcgccgtcaccgtgcccgcaccataaacaagattcagataatcgcagaggtcggaaacgaattttttgcgattctcgaacttttcgcggtcgtggtctctgattatcatgctgacaacgcaggaactttcatcacccttgatgtcgcagacgtgatagaagccctcgtatttttccgtgtgcgcgggcgtttcagccgcgggcagacgggaaatgaactccgcgcctataagcgttgcgtttttcatcttgtttttcgcgtcgcccgggtgtatgtttacgcctttgatttttattttcgcccccgcggcgttgaagttttcgtattcgagttctccgagttcgccgccgtcaacggtatatgcccaatcgaccctgaagtttttgagatcgaatttgtccgccccgcgtcccacttcttcatcgggggtgaaccccacgcgaacagccctgtgcgagatctcggggtgagaaacaagatattcgcaggcggtcactatctccgcaacgcccgctttgtcgtccgcgccgagaagcgttgagccgtccgtgacgatgagttcctgtccgatatatttttcaagcgaggggaaatccgaaacggtcaggtattccccgtgaccgagttcgacgtctccgccaacatatttaataatacgcggctttatatccgtgcccgaaaccgcgggggaagtgtccatgtgtgcgataagtcccaccgtcgcatcgttttttctgtcttccgttgcgggcaggtagccgtaaacgtagccgtattcgtccatgcggacttcttcaagcccgatgcttttgagttcgtcggcaagaaatgcccccaacgctttctgcttttcggtggacggtgtggagggcgagtcttcgtccgatgttgtatcaaacgaaacgtatttaagaaatctctcggttatcttcaaaattcaaacctgctttccgatattataatattattacaggcatatattatcacaaccgaacgaaaaaatcaatagtgcggcgcgaaaattttccgtgaaaacacggcggtaagcgcaacaggcttttactcggacacagtcgaaactgcttatttattcgttgctttcgattttaattcattttgcctgctcggcactttccgccgaaagtctcgtcagccgattccgagcggtttttgccgttctttactttcctccgaaagccttctgccgtattttttgccttttttctcgttttgtttgctttccgacgaaagtctctgttactttttgccttttttgggggcgtctttcgtcaaaaaacgccgttttttatgcaattaaaagtgattatgcgtgaaatattctttttaatcattattttatatgtatgtttgtgtttttaatgtgaataaaatgaaaaatttacaaaagttacttgacaaccataacatgatattatataattgaaaaaagatgaagaaccgttttttccggtgtcaaaggcgagacgttcgttatttttcgttcgtctgtccgatttggtttccgcgggtcccttcccgaaagggaagttttttcggataaccgacagggcgcgctccttgccattaggaggcgcggctctgagtttataaaattttttggaggtattatctctatgagcaagaaattgattgcgcttctcctgctcgtggctttggttgtcggctgtgcgctgaccggttgtaaaaaagatgataacaacccgaccggaacgaccgagcccgtcaaggtagttcgtgagatcaaaaaaggcacaaaagttattctcggtaacacgacagagctcagcggcgacttccgttggcccggcttcggcgggtcttccgcgggcgcgtccgaccaggatatcaacaaactgaccgtcggctacggcacgatggaaacagaccagaacggtgcttatcagtggaacgccacctctgttaaagagcacaaggaaacagagaatgaggacggcacttacaccatctccatcactcttaacgaaggtcttaaattcagcgacggttccgctatcaccgctaaaaactacgttgcgggcatcctttccttctcttcgcccgtttccgttgctgcgggtcactccggtatgagcggccaggctttcgtcggctacacctcgttcagagcatacaccggcgctgacgctccggaaggtgctaccaaagagttcgcgggcgttcgtcttctcggcgactaccagttctctcttaccgtttcctcggatcactatccgtactatttcgcttacacttacggcgcaattgatcccgacttcctcgcatgcgttctcggcgaaggcgttgacgttaaagacgacggcaacggctgctacctcaccgatgacttctatgcaatgaccgaaggcaaagacgctacttacgttaaagctgaagaaatcaaagcaaacagatatgataccacaaagtatccgttctccggcgcgtacaccatctccaagtgggatgagggtacttccgaagcaacccttctcgctaaccccgagttccagggcaacttcgaaggcatgaagccgaccatcgaaaccatcgtttacagaaaactcgttgacgagacccagcttgaccagctcaagaagggcgaagttgacgttctttcctctctcaccggcggcgacgttaccaaggcggctcttgctgttgttgacggaacgaacttcaatgaagttcactaccagcgcgcaggctacggtaagatccagttcgactgcgacttcggtcccaccatgttcgcttccgtacgtcaggctcttacttacgcgcttaacagaaccgaattctgccagaccttcaccggcggttacggcgttgttgttgacggaccttacagcccggacttcgcgatgtggaaggcagttaaagacaacatcactcttatcgactactctttctccgttgcaaacgctgaaaaagcacttgtagacggcggctggatctacaactccaagggcgaagccttcgtggctggtcagaccggcgttgacgcggttcgttacaagaaacttaccgctgaagaggctgagaccttggacggcgttaacaagacctatgcgtctgttaacaacaccgacggcgttacctacaagaccgttaaaatcggaaacgattactacatgccccttgcaatcaactggttcggcaccacgcccaacagcgtaaccgaccttcttaacaccacacttgcaaacagctccgacgttgctgctctcggcattgttatccgtgcgaccgtgggcgacttcactcagctgctcggcgaaatctaccgtgacgcttcctacggttatgcgggaactccgaccttcggtatgttcaaccttgcaaccggctggaacaactccgtttatgactacgctttcaactggtctcttgacgaggcttacttcggatattcttcgaacaaactctacgacgagtatgacaaagcattcccgtacgatcttactgctgaaaaacttacttttgaagaagctatgacccagtccggcggcaaactcggtatggactacctttccatgggtatggtttacaacgctaagaccgaagaagagtacaacaagtggtgggaagcttacatcgaaagatggaatcagcttatgcccgatatcccgctgtactccaacatgtactacgacgtattcaacgcaaagatcaccggcttcgtaaccagcccgttcttcggtatggcaagagctatcatctatgctgacgttaacgcgtaatcgcataaatagtacagaactgttttacagttacataggttaaaggacggggcagccgtttcggctgccccgtttttaaacatctttattataactttgtaaaaacatcttcggtctttccggaatatccgtatgcccccgcgttttcggtgtggggtacagatattaaatctccgtgcgactcttttcaagagttttccgttttgcggatgcgtacggatattgccggaaatctgatatcaggggagtttagtatgggcaaatatatacttaaaagactcggttatatgctcgtcgttatgcttatcctttctctgttgatgtatcttgtatatgcaatgatcccgtttgacagaggacgcgcagaggctgaaaagcaaagagacgcatacaagcatatgccagacggcggcgcaaagttcgagcagctaattgagcaaaagcggaaagaactcggaaccgaccagaacgttttcgttcgttatctcggctggataggcgtcgcgccgataaacggtcattacaacggtattcttcaaggcaatttcggttacagttatcagtattcgagagacgccaaggacgttcttatagagccgatgaagaacaccatatttataaacatttttgcaacgatacttgcgctcggaataaccattccgctcggtattttctgtgccgttcaccgcggaagcaagcgtgacacggcgatacagatagccacgatagtcggttacagtattccgacgtttattataggtatagtttttatctggatttttgcaacaatgctcggctggttccccgtttccggtatgggaacccccggcgcgaactataccggcgcaagagcgttttttgacaagctttattatatgagcctgccgcttatcgcgatgacgttcgcctctctcggcggcatgacgcgttacgtccgcgcttccatgacagaggctctttcgcttgactgcataagaactgcgagggcgaaaggtctgcgcgaaaaaacggtcgtttacagtcacgcttggcgaaacgcgctgatacccattataacgcttgttataggttggttcctcggcatattctccggttcgattatgattgagaatattttcggactcaacggcgtaggcaggctttatatccagtccctgaacaacaaggattttgaagttgtgcttcttcttcagatgttctatgttttcatcggacttatcggaaaccttatcatagatatcgcttacggtatcgccgacccgcgcgttcgcgttaataaataaaggaggacaatgaaaaatgagcaatgagaataagtcctccgaaaagagagttttcactcctttgaagtggctccgccgtatgtttatgggcgcttcgaaagaagtttccgcggcggatgaaagatatgacagcccgggcaaacttgcggtcaagagatttttcagaagaaagtccgcgcttatagcggtcatcgtgcttgccgcaatgttcctgtttgttatcataggtcccattgttgcgcccgtcgatctgaccgaaacgggaagcgaaatgcttcacgccaacgtttcgccgacgatgaacatgatgaaacttccgtccgcgatgaaagacggaacggttgacatctcttcgagaggtacgttcaccgtaggtcttgacaccgacggcaatgtttatacatggggctactatttcaaccacgcaaaggacgacgcgcagcgcgacgttcttaccgttcccgaagaggttaaaaacgcaaacatcattcacgttgccgcaggttcggatcacgttgtggcgataggcgacgacggttatgtttacgcatggggcgaatacgacaacggtcagtacggagacaagggttcaatgatagccatgtgccgtaagatgaccgatgaacttccgtctgacggcaaagttgacccgaccaaagttaaacaacttctctgcggtcagcaggtaaccgccattcttatggaagacggcaagatatatgcctggggcaacgacggactttccgccaccaacctttcctccgttatcaaagcgggcaaggaaaacggtaaattggttaaaatcgcatttacaaacgacggtatatacggtattgacgaaaacggaaaattcgtcagaggcagaagcacaaaattcgattacatcaacgccaatctttccgttgaagacgcgataggcaaccgcaaatgcgttgacattgccgcaaccggaacatctttggctcttcttcttgacgacggcgaagtggttcttgtcggaatgaaagaacaagttcccaccgttgcggacggagataagatagtttccatctccgcgggtacccgccactacacggctgttaccgagcagggcagagtttactgctggggacagagttacagaaatcagtgcgatattccctcgtctctcgcagatgccggttcggttgacaccgtattcgcttccggtttccagaactatgctttcaaggacggcaaaaacgtcggcaactggggtcttaaaggctaccttatgggtaccgacgaaatgggtcgtgacgtgttcaaccgtcttatgaacggcggtatgatgaccatgtccatcggcgccgttgccgttatcgtttccacgataatcggtatcatcatcggatgtctttccggctacttcggcggcgcggtagatatgatccttatgcgtgttaccgaaatattcggcgctatcccgttcctgccgtttgcgcttgttctttccgccgttctgaaatattcggacgtcaaagagaatacccgtatctttataatcatgataatcctcggactcctttcgtggaccggtcttgcaaaacttgtccgcggtcagatacttgcggagcgcgaaaaggaattcgttaccgccgcgcgttcaatgggtgtccgtgaaagccgcatagcgttcaagcacattctgccgaacattgtttccgttattcttgtaacggtaacgctcgatttcgcgggttgtatgcttaccgagtcctcgctttcgtacctcggcttcggcgttcagcttccgcgcccgacttggggcaatatgctcgacggctcaaagaactcgcaggttattcagaacttctggtggagatggctgttccccgcgctgttcctgtctatcgtcgttatctgcataaacataatcggcgacacgcttcgcgacgtgcttgacccgaaatcggaggtggagaaataatggctgaaaatatcgaaaaaacaacacatccgaacgaagagcctttgcttgaagttcagaatctccacacgttcttcaaaacaagaaacggcacagtaaaagccgtaaacgacgtttcgtattcgatctatcgcggaaaaacgctcggcatcgtgggcgaatccggctcgggcaagagcgtttccgccatgagtatactccgtctgcttgacgcaaacggatatattgccggcggtactgtcaaattcgagggcaaagacctttcaaagttctccactcagcagatgtatcatatccgcggcaaccgtatatcggtcatcttccaggagccgatgacgagcttgaaccccgtcttcacggttaaaagacagctttccgaaccgtttatgattcaccagaatatgtcgaagaaagaagcggcggaaaaatgtatcgaaatgctccgcgcggttcagataccgaaccccgaagtagttgcgagacaatatccgcaccaactttcgggcggtatgcgtcagcgtgttatgatagccatggcgcttgcctgcaaacccgacattcttatagcggacgaaccgaccacggcgcttgacgttaccattcaggcgcagatactccgtctgatgaacgacctgcaaagagaaaacggcaccgcgataatgtttatcacgcacgacctcggagttatcaacgagatggcggacgacgttgttgttatgtactgcggtcaggttgttgaacaggctcccgcaagagttatttttacggactgcaagaagagccacccgtatacggagggtctgatgtattccattccgcgtcttaacgacgacagaaagaaacttgacccgattcccggcgttgtgcctcacccgctcgatctgccgaaaggctgcaaattcgcgccccgttgcaaatattgcacgcgcagatgtatagaggaagagccgccgctggcaaaggttgcggacaaccaacttgttcgctgcttctatccggataaagaagaaaggaggagcgccgctcatgcagaaattactgtcgattacgaatcttaaaaagtatttcccgatgccgaaggcgtccgtcttctccaaacaggtatacaacagagcaaacgaggatataactctcaacatttataagggcgaaacgttcggtctcgtcggtgagtccggctgcggaaaatctacgctcggacgtgtgcttctccaactttacgaacagaccgcgggcagcactatgtattacggcagaacgcttgacaccgttgcccccgaatatgttatagacaccctgaaaaatgccgaaaaatatgttgcggaatatcataaagcgcaggagcacgcagacaaacttgcaaaagagtgcgacgaaaagggcgatgccgcaacgttctttgacctgcaagacaagaatcttgcggcttgcaacgccaaaaccgcgcttgacaatgtttccaaaattctcggcggattcaccgtccgtgacacgaaaaaaggcgcggatatgcttctttcgaagtaccgtctgacctttaaggcggaaaagattcaggaggagatagacgatatcgacctcgacatctccgaacttgaagccgatctttcggaaaatacggcaaaagcggaatccgcaaagaaaaagattgaaaaactcaaaaaagccaaggctccgcttgaatcggacaaagaaaagttgctcggcgaagcggcaaaaatccagctttcgatagacgaacagaaagcaaagtatgcgggcgacgaagagtttgccgaatacgaagcaatgcttgacgacggcgtcgatctgagaagattgaagtataccgaaatgcgtcttctgagaaaagacctgcaagtcattttccaggacccgtattcgtcgctgaacccgcgtatgaccgtaggtcagataatcgaagagggacttgtaacgcataagttcttcaagcgcggctctaaaaaaatgcaggagtacgttttccaaataatgaattcgtgcggcttgcagaattatatgtacaacagatacccgcaccaattctcgggcggtcagcgtcagagaatctgtattgcgcgttctcttgccgttaaaccgaagttcgtcgtttgcgacgagtgcgtttcggcgcttgacgtttccattcagtcgcagataatcaacctgttgcaggaactgaaagaaaaagagggactgacgtatcttttcatttcacataacctttcggtcgttcgttatatttccgaccgtatcggcgttatgtatctcggcaacatggtggaggttgcgcccacggacgttatctttaacgatccgcgccacccgtacacgatagcgctgctttcgtccattccgacgaccgacccggacagccttacaaaggaaagaattatccttgaaggcaatatcccatcgccgataaatccgccctcaggctgtaagttccatacacgttgctttatggcttgcgataagtgcaaagtcgttccgccgccgctgacggaggttgaaccgggacacttcgttgcctgccatttcgcggacacaaaaaaagttgacgagaacggaaactatctgttcgacgtcaagaagacaacgaacgcaagatgatttttaaggcatggcgcagacttcctaaaaaagcagacgccgaaaaagaagaaaagttaagagaagaaccgcttgaaaagggcgatcggtttgcaatggtcttttcgtcgttcctgacgctgtttcttcccgctgtcggagtccttcttattatcggaggactggcatatcttgtctttgctgttctgtaaacagaaaaacaggagggtatatcaagcgatataccctccgtcttcacggataaaattttaatattgcgataaaaaccgattgcggtaaaatatttgaacgttacggacttttagcctctgacttgcgaaaattttcgctttattccccgtctatggcgcgtttgaacttcggaagcactccgataccgttcgttcggtgcggcgggagttggtagatgtcgtgtcccggaaattcgttgccctcgataagcagcggacctttttccgtcacgcagacgtcccagcccacaagtccgacttgcggaactacctgtcccgcttcgcatacgagttttatcacttcatcccaaagcgggattttgaatccttttatggaaacgcccgtcatcgggtgcttttcgtaaaggttgcccgatttgtcaagcgcgggataaattatctcgccgcgggcttcttctatcggcacaaccatgccgccgctgttgaagttgtcaacgtatttgccgttgcctatgcgcagatatgccgcaacgacgcgtgttttgccgtccttcgctattgttatgacacggcaggtgttgaccgaattggggtgcaggcgcataaggtcggggtgttgaacaacgggctcttcaagcagcatgagatttgcttcgacaagatgcttgcgcagagattcaacgctgtcaaaatcggaaaaattcagcttttgaatacctttgccgcacattccgttttcgggctttgccataaacgttgagtgtttttcgcagaaagcggcaagctgttcgtccgttgcggtgtgaacatcgagccaatctcgtttaagaaacttttcgaaacggcggttgaattcgagtttgtcgtcgatgtatttcatatacgcggggtcgttgaaacgcttgataaacgcgttgttgatgccccttgtaacaacggtctttcgctgcgcgcgattcaggtcgtacatctcaaacagccaatagtccatgtaacccgcctgatatttcagaccgcagtttatcatatcgaaaaagagataaattttgctctttccggtctttttatgtatgtcgtctatcttttcgaacatcttatcaaagtgcatcgaaaagatacgaccgcacagatattttatctttcccaaaaccaatgtctccttttagcggcgatataaataagatagaatgaacaaatatcgcccgtatttgaataagtataccacaaaaacacaggaaaatcaatatcagcaaaggaaaattatgagcgcacaccagaagaaagtcgaaacggcgaagataacgcgcgatatgacgcaggggaatccttacagtcacatggtcgcgtttgccatgcccgttcttttaagtcagatatttcagcaactttacaataccgccgatacttttatcgtcggcaagttcctcggcacggacgcgcttgccgccgtcagctcgtcgggaacactgatttttttattgataagcttttttatgggcacctccatgggcgcgggtgtcgttatatcccgctatttcggcgcgcgtgacgcggacaacatatctcgcgcggtacatacgaacatcgcgttcgggcttgtgagcagcgttatactgaccgttttcggtgttgcgttcaccccgacttttttgcggtggatgaaaactgacctgtcggttttgccgcaggcaacggaatatttccgttattatttcctcggcgcgatcgcgatgataatgtacaacgtctgccgcggcatcatgaacgcggtcggtgacagccgcagaccgctttattatcttattttttcgtccgttctgaacgtcgggctcgacgtgctttttgtcggcgcgttcaagtggggcgtttggtcggctgccgtcgcaacggtcatatctcaggctgcaagcgtcgttttgtgctgtattcagctgatgaaaaaagggcagatatacagcgtttctttgcgcaaaatacgttttcacaaagacatgatgatagagatagtccgttacgggcttccgtccggcatacaaaactccgttatcggctttgccaacgttattgttcagacgcagataaactccttcggaaaattcgcgaccgcgggttacggcgttcatgccaagatagagggtttcgcgtttttgccgataacgagcttcaatatggcaaccacgacatttatcagccagaacctcggcgcgagagagttcgaccgcgccaaaaagggcgcgcgtttcggaattttggcggcgaccatagccgcagaggtcataggcgttctgaactatgttttcgcccccgcgcttgtcggatttttcgactcgacgcccgaagtgcttgacctcggagtccgtcaggctcgcacggtcgcgctgttttactgcctgcttgcgttctcgcacgcgatagccgcaatatgccgcggcgcgggcaaggcgtttgtgccgatgacaattatgctttccgtttggtgcgtgttcagaataatctacatcgaggctgtcgttcatattttccacgacataagttatatctattgggcttacccgataacgtggggtatcagttcgataatatatatgatctattacaaacgttcggactgggtacacggctttgaacatgaacaaaagtcattttttgcccgcatagccgaactgttcaaccgcaacaagacagctccggaaattccggaagaggaggacaactgatggaaaacacaaaaggaaaaaccgaaaaaagcctcagcgtgccgcaatatttttcgtgggtgaaccacaacaacgacggaacgaccgaggagatcactctgacgaaccttgattttttcgcgtggcttaaacgcgagttcggtatgaatatcgaaatttacgctttcgacgcgggaaatttcgattcccccgattataagtttttcgaccccgaaaacgaacagttcaaaaagaacttcccgaacggcttttcaaaagtcgcggaaagggcgagagagctcggcataaagctcggctattggtgcggtccggacggtttcggcgaaacggaagaggacgccgaaaagcgttcccgtcagataatcgaccttgttgaaaaatacgaggctgggcttttgaaattcgaccttgtcggcggcgatatacgccccgaaaagataccgatgtttgaaaaaacgattattgaatgccgcaagatctgcccggaactcatcgtgcttattcaccgtctcaatatcggcgacgcgcagcgtttcgcgaccacgtttctttgggaagggcttgaatcgtatacggacgtgcttatccgcaacagaaactgcgctccgcatcaccgtgagtgcggacttcgccgcggacttgttcccgatatgctccgtctgacggaggaccacggcgtttgcctttcgtcctgccttgattactttgaagatgaacttgttgttcaggctttctcccgtgcgcttatactttctcccgagatatacggaactcccgcgctgctgcgtgacgatgagttcccgcgtcttgcgcgtatatacaatcttgccgcaaaatacagaaaacagcttgtcgagggcttcccgctcaaagacgatgatgtttgccgcttcggcgaaaacgccgtgagcaggggcgacgcaagaacccgtgttatgactttcaagaaccttgaatggaagccgttcgaggcggttatccgtcttgatgagacaataggtctttccgccgacggcgatataaccgttgtgcagtatcacccgacacagcgtctgctgggcacgttcaaaaagggcgatatcgtccgtgtgcccgtggcacagttccgcacctgtcttgtcgttgcttccgttgacggggttgacgatatattgctttcgaactgcgattacgaagttgttcgcgacgttgcgggcagccccgtaaccgtgatcatcgcccgcgcaaacggcaatgtccgcgtgctttcgcagggcttcaagtctgcctctcttgacggcaaaaagatgcccgaattgcttgctgacggcacggaaataaatgtgaacgttataaataaagaacccgagtatctcggaaaattcgaactctgcgacactcccgacttcgcggaagcgctttatgaggcggattgctttgccacggacggacacagccttgaaatgcagtcccttatccgcgcgggcaagacgaaatatcccgaagtcgaagccgccagaaacgcatttttcggtcaggagggctattggataagaggctgcgaccccgaatatatgtttgacggcaaggacgagacgttttatgacgcgcgttcgagaaaatacggccgtcgcataaagaacggctgcctgcgcgtcgatctcggcaaagaaatccttgcggacagcgttcgcatcgaggtttttgccgccgatgagggctctgagggttgcgttccgaatgttttccccgacttgggacagacctcgagggatcgcgttttgtggcacgatatgccgcttgtttcgaaaaaggaactccgccgcgccgaagagccgttcccgatagagaacgtggacagaaagatatatgacaaaggctctcgcgttgaacttgtttattccgccgccgcgccgttccgctatcttcgtctgccctcgccgcccgaccatatccacgcgcttgaattttataaggacggcaaaaaactcgatgtcggaactccgaaagcaaacaatatgcttgccgcattcaaggattttgaccgcattgtaagcacccgcaaacttacggtcgaagttcccgccgatgcgtcgcccgatgcttttataaccgttgcggttgacgatatttacggcaacgacagcctttatgttgccgccgtttgcgacgggaaatatatcggctgctttgaccgtgcgcccgcacaccccgtcaactggtggggacattgggttgttgaatgctcgcacaaatcctcgcactatatccgcgtcgatgaaaatatgcgcggtaaaaagatagatatttacgctcttcacttcgactttgatatggaggacttccgcgttttcgcatatctttgtgaaagtaaaggcaccatgctcggctcggaactcaaattggagaggtaacgaagatgaaaagattctttgcaatgttgctgcttgccgccgttttttgcacgtttttgtctgggtgcactgtgagcaaacgaaccgaagaaacgaccgaaacccccacagcgcccgaaccggagcgcgaacgcgatgaaaacggacagtttgttttcgatgttcccgaggtcatgaacgggctttactgctccccggggcttgactttgcaaactccgaagatgtcgagggaacggactacatcaactgcgtgattctttccgcttatgcacaagacgaccttgcggggcagatacgccttgcgataaagaacggtaacgcattttggataaacacccagttccttgaaagaggaattgtcaaagataagtggggcaaacgctatatggcaattgccgaagattggcaaagcgaaatggacaaggtcgttgcgaccgtgcgcgaagagggcgcgttcaattacttcctcggtttttatatggatgagccgttgctcaatcgcttttccgtcaaaaacatctatgacttttcaaaatacaatcacgacacgttcggcaaacgctacttcatctgttttgcggttgagggaatagttccgtccgaatacaacgacggcgtgaccaacggacatatgacaaaacagtattcgacatatatcacggacgccgcctacgatatgtattgggattttgaaacgtataaagataagtacgagcgcataaacgaaaaaatgaaacttgaactgcctgacgcttgccgcatttggtatatcccgtgggcatatacgactgcggacaagagtatgcctgccgtcagacttatggaaaatcagttgcttgcgcatctgaacggaatgaaagagttcctcgacggcgaagaacacaagggcggcttgatgacgttttgctggaaaggcgaa

SEQ ID NO: 4500 - DNA, 7925 bp, Unknown
  16S sequences of unknown bacteria
caaattttttgaggaggatgcagttctaaatggaaaatgtaataaaggaagttgcgagccgtataaaagaaacaaggcttgtatgcgagatatcagaagaagaaatggcgtcatgcaccggcgtcagcgttgaaacctaccgtgagcttgaagcgggagaagcggattttacgtttactttcatatataaatgcgccgcgagattcggggttgacactaccgatttgctgaaaggtcaaagcccgacgctcaacgaatacaacgttacaagagacggcggcggactcccgatagtcagaagacgcggattcaagtacaacaacctcgctccgcttttcaaaaacaagatagcagagccgttcagagttaaggctaagtattcgcccgaggaagcagacgctccgataaagctcagccgacacgagggtcaggagtacgactttatactttccggcaagctcaaggtcgaaattgacggtcataccgaggttctcagcgaaggcgactccatttactacgattcatcaaagccgcacggaatgatagcatacggcgaggactgcgaatttcttgcggtagttatttcctccggcggaaaggcttacgattatcccgagcagtttgaagagaagaaaaaagttgtctcagacgaaaacaagctctgtcctctccccgaaaatcccgttgcgctgaagtttgtcgagtgcatcgaagaaaacggcaagcttaaaaagataaagttccacaacgaggacaaatacaactttgcatttgatacagttgacgcgatagccgaaaaaactcccgataaggttgcgcttctccacctcgaccacgagaaaaacgagagaagattcacctataaggaaatatcactcctttcaaacaaggcggcgaactactttgtttccctcggcataaagcagggtcagaccgttatgctcgttttgaagagacattggcagttctggatagcttcccttgcgcttcataagataggtgcggttgctattcccgctacgcatatgcttgtcgagcacgactttgactaccgcttcaaggctgccgaggttgccgctatcgtatgcactgccgacggagagaccgcaatgcacgcagaaaacgccgcaaagaacgtcccgcagaatataatcaaaataatagctcacggaaagcgcgacggctggcattccttcgacgatgaatttgaaagctaccccgacacattcgcccgtcccgagggagcctgcggaaacgccacgatgtatatgctgttcacaagcggaacgacgggttacccgaagatagcggctcacagctacaagtacgcgctcggtcactatatcaccgcgagatactggcacaacgtcgacccgaacggaatccacttcactatttccgatacgggatggggcaaggctctctggggcaagctttacggtcagtggctgtgcgagagctgcgtgttcgcatatgacttcgacaagtttgacgccgccgatatactcccactcttcaagaaatacaatataactacattctgcgcgccgccgacaatgttccgtttcttcatcaaggcgggtatcgagaactacgacctctcatccctcaagcacacgacaattgccggagaagcgctcaatcccgaggtgttctacaagttcaaggaatacaccggactctcactcatggaaggctttggtcagaccgagactacactcacgattgcaaactttgtcggagacacaccgaagcccggctcaatgggacatccgtctcctatgtacgatgttgacataatcacacccgaaggaaagtcatgcgaggttggcgagaccggcgagattgtaataagaaccacagaagaagctccctgcggactgttcaagggttactacaagaacgaggaagctacgcacgaggcatggtacgacggatactaccacacaggagacaccgcttggagagatgaggacggatatttctggtatgtcggaagaatcgacgatgttataaagtcttccggttaccgcataggacctttcgaggttgaatcggttattatggagctgccgtatgtgcttgaatgcgccgtcacagccgttcccgatgagattcgcggacaggtggtaaaggcgtccattgttctcgtcaaaggcaaggaaggcacacccgagcttgtcaaggagatacagaactacgtcaaggagcacaccgcgccttacaaatatccgagaattgttgaattcctgcccgagctgccgaaaaccatcagcggaaagattcgccgcgttgagctcagaggaaaaaaataatcgctaataaaatatttctcatgcccattgaaattccgtgcgtattttagtataattatattgaaatacagaggatactttcggacgaaaacatcctcaacgaaaggaaaacgacgcatgagaattatttttttggatcttgatacgctaagaccagatcacctcggctgctacggttactttcgcaacacatcccctaatattgactccatagcacgtgagggagtacgattcaacagatattactgctccgacgcaccgtgtctcccgtcaagaagcgcactgtcaagcggtatgttcggcattcacaacggagctgtaggacacggaggaaccgcggcggatcaattcatcgaaggtgaggagagagacttccgcgcgagatttgcgtccaccaatctgttccagcttttcagaagagcgggaatgtacacggcaagcatttcgaccttcgccgaaagacacacgtcatactggtactacggaggatttaacgaaatacataatataggctccggcggcggggagagggcggatcaggtgtctcccattgccatcgactggataaagaaaaacggcaaaaaggacaactggttccttcacataaatatgtgggacgctcatacgacctacagaacacccgccgaattcggtaatccgttcgacggagacgacttcttcgagcacacatggatgacgcaggagactatcgacaggcagaggaaggaagcgtcaccgcacggagtccgtgagataggtatgtacaacaacactcccctcccgaactatccgcgtcagcctatggaagtgcgcgacatgaacgactacagacggctcgttgacggatatgactgcggagttgcgttcatggatatgcatatcggatacatccttgacgcgcttcgtgaagagggaatatacgacgacgtttcgttcattatcagcgccgaccacggagagaacataggcgagcttaacagctactccgagcactccacagccgacgacataacctgccgtattcccatgatcataaagtggcagggaggaatgagcggaacaacggacgacacgctgaggtacaatatcgacctttgcccgacagttgccgaccttctcggtgtgcagaaagcgaaaaactgggacggagagagctatgctcccgcgataaaagacggaacaccatgtccgagagactatcttgtactgtcgcagatggctcacgtgtgccagagaagcgtagtattcggagactggctgtatatgcgcacataccacgacggatatcacaattttccgcacgagatgctctacaacataggtaaagacccgcatgaagagcataacgtagccacggagcatcccgaaatctgcgataaagccgcgcatatgcttctcgactggttcgacgactgcatgatgaattcacctcagccgacagacccgatgcagacggtgctcagagaaggcggaccgtaccacacaagaggaaacctcggactttactgctcattcctcgaaaaaacagaacgcgcggacgaagccgaaagactcagagcgcgtcatccaaacgaaaaataattaaggagaaatatcatgacagaatggctcacgaatttcgtgaacaactacctgactgattttgtagtcagactgctgttcgcgttagtaatacttgtagtaggatttgcgctcgtcaacgctatcgacaaaaaaatcagaaaaaacgaaaagttcagaaaaagggacgaaaccgcatcgtcattcctcacaaacttcgtaggcggcgcgcttaaggttctcatcgtcatcacggcagtcgtagttctcggcgttccgcaggctacagttgttgcagtaatcggttcatgcggcgttactatcggtctcggacttcagggcggtctttcaaacatagcaggcggacttgtgataatgttctcccatccgttccgtgtaggcgactacatttccggcggcggagttgaaggcgttgtaaaggacatcggcatatactacacaaagatagttactcccgacaaccacgatatatccgttccaaactccacgctctcaaacagcactattaacaacctctccacagagaaaacaagaagaatcgacttcgacttcaacgttgactacaagacggacatcgaccttgcgagaaaggttctccttgccacagcttccatgaacgaccttgtttcaaaggatgtagctcccgaggtatttgtaagcggtcacggagacagtgcgattgtactcaagctcagagtatggtgcgcggctgaaaactactggacggtttacttcgatatgtgggaagacgtgaagaaagcgttcgacaagtttgagattgaaatcccgtataaacaccttgacgttacggtaaagaactgaatatgatataaaacggctcagaaagaagcgaaaacttccgacgagctgctttttgtttgccgtgagatgcgaaagtgatggaaatgtgaacaaaaaccacccacgccaaattaatctacacaaaaatacatttttctttcaccataatttatataatgttaataatgctatcacaaacgtctgctataatatagtcagaaagaagctcggggacggacgatatgcctcgggtgttaaattaagaaaggcgtacaaaatgaacgtacttatgctgctcaaacccaagagcgaggtcgaataccttattgatacatacacgctcagacaggggcttgaaaaaatgcgtgctcacggatataccgctattccggttatatcaaaggacggcgaatacatgggatgcgtaagcgaaggagattttctctggcatattattgacaacgccgacaagataaaaggaatcaagaaatgtgaaaactacagcgtgaaagagataatgaacaaggatcgcaatccggcggtaaacatcggagtgtcaatggaaacactcgttgaacgcgcggaaaaccagaactttatccccgtagtcgacgacagaggatattttatcggcatcgtaacccgtaaaaccataatcaataccttctgcgactacgaaaacgtgaattatctccagcacgccacggttcaaaacaacgcagtcgagagcagagccgttcccgtgtaaaataggtatcccgagattgcatttgacgcatttttcgggatatcttttttcttgaccttagctcccatgtatgatataatattgaaaaatgttaaataggtgcgcggtatgaaggacttaaaactcggaataatcggaacaaattttgtctctgactggctttgcgatgcggtgaaagagactgacgggataagcagcagtgcggtttattcaagaacacacgaaaagggaagcgaatttgcagcaaagcacggtatcggctgcgtttatacggatatggacgagtttctctgctccgatattgacgcggtgtacattgcttctccgaacaagttccactatgagtacgcaatgaaagcattgaacgccggaaagcacgtactgctcgaaaagcccgcaacgctgacgagggatgagttcgagtctctcacaaaatcagccggagaaaagggagttgtggttcttgaagcaatgcgtcccgtacatgaccccgcgcttgagatgataagagaagcaattccgaaaatcggtacacttcgccgtgctgttttcgacttctgccagtattcctcgcgctatgacagattcaagaaaggcgagatactgaacgcgtttactccgtctctcggaaatgcggctgtcatggatatcggcgtgtacgcggttgaggtgtgcatggctctgtttggtatgccgaaggatattttcgcgcgctccgtgaagctgtcaaacggatttgaaggcatgggaagcgtatttttcaactacggcgacttccaagccgaggttgtgtattcaaagataacagactcatttaacccctccgtcataacaggcgaggacggatatatttcgataggaaagctgtcgatgatggaatacgccgatgtaaaaatgagaaacggcagtgaagaaacgctgttcagggacagattcagcggaagctcgacaaatatggtatacgaggtcggcgactttgtgaaagcggtgcgcggtgagcttgatgtgaaaaagtatcacgaatacaccgaaggaacgcttaagataatagatgagataagaaaacagaacggaatagatttcggcgggagcatatgaaaaacaacaccaaaaagataatatcactcattctcgcggcggcaattctcagcggatgcaccggcggaaatacagaagacacaacagatacggaagaagctgttgaaacctccgaaaccgtacccgagacagcggaagaaaccgaaactgagacggagacggtaaaagcacctgtcgaaaccgaagctccggcggtcagcgttatggaaaacgtactctcggctgacgattatccggcggatctcgaaggctacgcgcgtacacttctcgagaagatacgctccgagatgacaaacgagaagaccggctttgcttacgaattcctcggtaagaagcagattgcgttcctgtggccattttccgtgctgctcgaatcggtaagctcgctgtatgaatgcgatacaactgacgaagaactgagggattactatgtcctgctacttgataaattcctcccgcgctacgaaggctcaatgtccgggataaagagagtttacgcgtcaacaatggacaacggcgacaagtattacgacgacaacgagtggatagtcatagagcttgtccgcgcatacagactcttaggagacgagaaatatcttgactatgcaaaggagcttgccgaattctgctacagcggctggtcgaattcaagcggcggcatcaagtggaaggtgggcagcgactcgtgcaacacctgctcaaacggacctgcggcggtgctgtcatgcatgctctacgaggacactggcgacgaatactaccttgactgggcgaagaagatatacgcgtggacgtatgaaaacctgcgcgacaccgacggcacatattttgataataagaaaataaacggcggctcagtcgacaaggcgaaatacgcgtacaacacaggcacaatgatagtctcaggcgtgcagctctacagaataacaggcgagaatgattatctcactcaggcaagacagagcgcaaaaggcggggaaaaggaattcttcctcaaaagcagcagccgttgtgttgtgagaaattcccatccatggttcaactcgtggcttctcgaaggatatatagagctgttcgagacggataccgaggacggatggacgaaagactacatagacgacttttataaggtactcgacaacgccgtgaacagagccggagacggaatatatgtgggtaaatcatggaattccaaagccgacagcgaggttgaactgatacatcaggcaggcacggtaagagcgcttgcacagatttcgagagtattgaaggaatacgcgaaataaaatttgaaaaatctcgaaaaaggtattgacaaagtggagaagaagtgatataataacaaagctgtcggcgagagcgtaaagcaaaagcaaagctca

SEQ ID NO: 4501 - DNA, 6249 bp, Unknown
  16S sequences of unknown bacteria
ttttcctacattagggggctttttgtctattgtccggttttactggtccagttcatttctcccgcggctttttctttgttctatttactttttctctggaaatgcccaggaaagggccttttccagaccttcttccctcagaatacgccagaattcctgccggttttccggcggctgtaccggcccttgcaggcggccttgctgggacagagcctcttcccctggcctttgttccagcatcagatctccggcgcactctttcagcagccgctcccctttgggagtggataccagaatcaaactgactccccggctgtcataggcccgggggtcaaacttttcgatgccccaataatcggcaatggtcacatcggtgcaccgatatggctgcggatagggacagtttccacagctgggccggatgatcgaccggttctcaaaaaacatctgataaaaccgtgggtcctcccctcgcaccggcatggtgctggtttggtactggaagatcttattgcttcccacccggctccagcccaatgctttggagcggaaggagacccattccagctttccaccccgctcctgctccaacagcttcttatatgcttcccaggccccagggctggggatgccatagcagatcacatcgcagcacaccagctcctccttctcccccagtgctcctaagctggcccgcaggccggcattttggcagggcgtgccggtgaaaagcacggggcggccctccagcaaatcggctttgatctgagagaaggtatcccccaggcggctttgcacatatttggacacccgcatggggtcccgctcttccggagtcacagcccgggcatgacacacctgaaggtttttatccagcaccgctccataaactgccccgccccgtcgaagcatggcgtccgacagggcggtaaacgccccaccagaggtggaaagggacagcaccctggcatctttgtgcttggccagataaaaggccggctctgctcccaccccttttccctcagggaaagggcagatcttttgacacaggccacagtcccggcacagttctttccggattaccggataaagaaagccttcctcatcgggctccatctcaatggctccatagggacaagcggacttgcaggcgccgcagccgcagcacaatgctttttctttgtaaacctggtccatcctcttacaagctcctggccagctggcgcactttctccagatcggcgctttgggccatatcccccttctgcttcataccgggaatggtgacgatgcccttgtcctcccatttcaaataggaacagatggctttgtactgactgatggccgcatcgtatacaccaggagagccggaatccagcagcagcgccgcctgattgtgatggaagccctttttgccacgggcatagagccggtcgataaagcatttcagctgggcgctcacatcaaaccagtaaataggcgaagccagcaccagcaaatcggcctggtccaccttctccagcagctgggccatgtcgtccttctgaacacactgcccgtcgtggccaaagcaatactgacaccccaggcaaggggcgattttcttcccgctcaggctgaccagttctgcctgatggccctttttccccgcttcctcccggaaggtctccgccataatatcggtgtttcctcctttacgagggcttccgctgacgatcaaaatgttcatatccgcttccatcctttcttttgtttgattttaggatacacccggaataaaccgctgtcaacaaagcatcaaaatgctttcaaagcattcttcgccctgttttatccaaccgatttcggcaaagaagggagaccgtttgccctacccttattgattcgcaaaaagccgcgacctgtgcgtggatttttgcacttttcaagggacaagtgtgcgccaaagcgtgcacgcagacccttgcagaaattcgaaaaagtgaactgggctactttttcgacatagaaaagcccgccgaatgtttcggcgggcttttgaggatacaatctaattattcttcgtggatcaggccgcccaagggctgaccggtataggcgtcgatatacacctcatagctaccaggagtttcgtcttcatggatgaacaccacactccacacggcccgggtcaaatgggtctccggatcgtagctgtagcctccctctttgggagtaaagatgaagttgggctccacaatggcatactcagcagcctggaacatcacaccggaaacaccgccttctgtcaggcttttttccgcagccttcacagcttcttcctgagaaatgggtttttggtcacttcccacctgaacgagcatcagatccagacaatcggcagagatcatctccccgtcttctgcggagatgaccacctgcacagtctggccctgggagcgcagtttgggcaggttcttcagccgggccacccgctgataggtgaccacccactggccctcctcctgtgtgacaccgctcatctcatagccggtggggaaaggcaagccccagttataataggcattggcccgctccaccgcttctgtggccgtttcgatgggcgcattggcttccgaatcggcggtgtagaaccggctgacccgggtgacgctttcatccttgctgcggtaagtcacattgcccatgggggtctccacaacccgcagctcccagccccgttccggatcactggtggtgtacacttccatatccgccacatcgggttcctggaagagcccctgttccaatgcgctctcataggtgatatgggtctgctttccatcgtcacccaggaacggggtgccgtctgcattggtcttgcggccaaagcacttcacctggaactcaatatctcccaaaatcagcttggtccgttctttcagttgttcatcggacataggttcatccacagcggtgacccatttcaggctgtcggcctgttcggccagatcggggtccagcatctccgccaagcggtttttctcctgattcatgccataggcatagcagaaatagcaggcaccgccccatacagccagagataccagaacaatcaccagcacccggagccatcttttctttttgggcaccgcaggctgagagacggaattctttttctttttctgagacattcttacactccttacgggtttgtccgttgttttcaaaacgctcctctgagagaggacatatatatttagtataccatagactctctcaaaaagaaatgagcaattttccccgaaaaggcagcctatgaagcggttttcctttatttatgtgcgcgccacaatggatttgttcttccatcttccagacaggtagtaaaggccggacagcaccacaccggccagccagccgatcacataacaatagaacaaattgtcccggccaaaatgatctgccaggaaataagctaccgggatacggatcagccacagagaaatcagggtggagatcatgggcacaatggtctctccggctccccgcatcactgcgttcagaatgaacataaaggaaaagaccacataaaaaggcatgatccgatccagataagcacagccagctgcaatcacctgtgggtcctgagagaacaggcgcatacacaccgtccccaggggtaccaggaaaatagccaccaccacattgacggcggccgacatggccacagtataccacattccccggttgacccgttccattttgccagcaccaatgttctgccccacataggtagtcacagcgatggcaaagctctgtaccggcataaatccaaaggtatccagtttattggccccctggaacccagcgataaaagcggtgtcatagcggttgatcagcgtttgcagaaccatgactcccacggaaaacagcgcctgctgaatgccggaaggaatgcccagcttcatggccctgccaaacagatgccggtcaaaatcccaatggaaggggcgaatgcgaatttccttgtaatgcttgttgatataaaaaataccgaacagccaggaacagaactgagcgatgatggtggccagggccacacccattacgccccaggagaacacaatgacaaacaccagatccagcacgatattgatcacacaggcaatggacagaaacagcagcgtggtacggctgttgcccagtccctgcaaaataccggcattcacattgtaccccagattgcccacaaccccggcaaagaccaccatcacataggtgcgggccataccataggcatcttccggcacattcatcatgcgcagcagcggccctgccagcaagatgcccagaatggtcagcggcacggcccccaccaaaatggcgttatagatggtggctacggttttgcgcaagctctccttgtcccccgccccataaaactgggagatcatcacggtggcgccggtgcccaaccccatgaacaaagacaccagcataaaaatcaccggaaagccggttcccacggcggccaaggcagcatctcccacaaagtttcccaccacaatgctgtccaccatgttgtaaagctgctggagcacatttccaaacagcaacggcaaggcaaacagacagatgagtttggccggattgccctgggtcatatcggtggccaccctttttttcttcacttcccctgtcaacgcacatcctctcctttctctttttcccacacttttctgttttataaaaagccgccccaaacagggcggcttttgtgccttatcggctttccgctggcgggtcgatcaccatctggcggtagtccagcggctcaaagcccttgcgggcatagagacgggccgccccgccgttatctggtgtcacctccagacggaaccgggccgcatggggaaattgtttccgaacaaaatccagcgcttcggtgcccaggccgcatccacgaaagttttcatggagaaacagctcttcaatgagcaccaccatgccccccacttccgaagaataggtgaaagacaggatcatatatcctgccgtctggccatctttttcgatgatataccctttgatgtaggggctgccctgaagcatctcctgaaaattcttgtggtaaatctccctggggatgggatgcagtacagcattgctgctgtaaaactcctggcccatgtccaaataccgtttttcatcctgggctgtcatctcgcggatcaaattatcctctcctttgaaaatcattacacaagacagtataccagcttctcacacaaaaagcaaagcccctcattcctcctgctctggctgctctggcgggaacaaacctcctcccagctgccgccataccccggcccccaccagaaagctgagggaaaagagcaaaatggtccagcacacctgtctctcttcttcatgctcgggcgaaaccggctctgccgaggcgctgtcctgggtttccaggacttcttcctcctgtgaccgggatgtttgctcgtagttttcctcccggctgctccactccagctttttttcggcgtattctcccaagtctccatcctgctgcgccaactgctggagaagctgctgctgagcgggggtggaaaactccagatgcagaagcaaagtggtgcgcaggtattcctcttcctgctcatccagcagcatctgatacaggcgctcatcggtctcttctccacctgtctgcatctccctcagctggatcaccgccgcccgaaaggcagtggaacggcttttgtccaaaataatggacagaagatcctcatcgctgaattcatccagccggtcgatcatcgccgccgtccagggagtgagcacatcttcctcttcaccgtggggactgtcggccaccacctcataggcccgctccatatcggccagaagctcctctggagtcagggccgtcagcagttcatacacctgatcaaaatccatttccccttcctgcagcagaagatcggaaggggcggcccatccatgaatccccaaacacaaggccagcaaaattccacagcaaaaaagttttttccttttcatattggctcccatctgcatcaagtcaacattttgcgtctttgccttttatcttactcaaaaagaaaaggctccgtcaagcaaagagactgtttgttcaaaagaagttctcattttccccggaaaaaagccgccaggccctgtgaactggaccagtaaaaccggacaatagacaaaaagccccctaatgtaggaaaa

SEQ ID NO: 4502 - DNA, 8104 bp, Unknown
  16S sequences of unknown bacteria
ccggcggcttcgccgccgggcctgcggcccccataccgctgcctttagcgcaatatgccggcatcgcatacaagctcccgactgttccggccgggagcttgtgttctccctggaaacatgatacaatataaaaaaggaagaaaaatgccgaatggtctgctgcggagggaacccatgaaagagaacggaaacagaacttatctgacacagggcttatcctgctggatatcggatatcgcgttttcccggttcaggagcttttgtaaccatgttcttggggttaggatcgatgagctcccctccgagcaaagcatttttatgcggcagaatttttcgatcatattatgcgcggccgtcttatacctgcttaccaatgggttttacctggtgaagaacatcatagaaaagacgatgatcccgatcgatatgataccgctttatatgatggtcgccgcatccctggccatgctgcttttcctggccctctgcaaaaaatatgattccccgctcgcgaggtttgctctgatggggtactacacaatgatcattgccagcgtcaccatttttatggtctcctgcaattttcacggcatcggtctttccatctccatgtgctatctgtttgttatcatgatcgcgccgacctacaaaacgctggataccgtcatcatctgcgttctgatcgtcctcagctggtggctccccagccggcttccctatgccgaaaactacgatctgttcaagcattttctgctgcgcttttccatcgttgtgggatttatcgccatccggtccatttttctccgccagtcccgcaatgaaagatccatcaaagaaatgacccattcctttatcaagcttgcctacaatgatgtgatgacaggaacgctgaatagaaaagcgatggaaacctactgcgcgtttaccgccgaaaaattggcgcccgaaacggtcagcgtcattatctacgatgtggatgatttcaaatcctacaatgaccattactcccacataaagggcgatgaggccctgaggctcatagccgaaagcgtggtgcgcatcctggaacgcatggaccggtaccttttccgcttcggcggtgaggaatttgtggtcattctgccgggcattgccgaagatgaggcccgccgcgttgccatcgagctccttggcgctgtccgggctgtcgccattccccgggatgacctgccgggcaggagcattattaccgcttcttttggcgtcgccagcgccagcagcagggagctgaacgacctttcggtcatcgcaaaggcagaccggcagctttatgtctgcaaaaaggacggaaaggactgcgtggcggccggtaatatcatatatcggtgactttcctgcgggggctgcgcgcctttccgccggaagcggccggcggcattacaaaaaaggaaaaacccaccgcaaaaataacacccccgcaggtttcgccctgcaggggtcatttttatggggaaacgccattacagcgctgccagcttgcgcacagtaccggctgtccgtatcgtgatccattcccgggcaggctcctgcgcggtccggggccaccagttggttttctggtatttctgccggtcaaagctccagaacaccgcgtctccacagggggataccttttccagtgtggggtgcggttcgcccaacccctcacatagttcatcggcagtgcagggcggcagcaggaagataagattgtcataaatcgctttatcttcgtggccccaccacgccggggactgggctagcagttcccgcaggctttcctgctctattacatataccgggatctccagcccaaatcgctcccgcatcaagcctgtgacctcgtggatcaaggctgctcggtcactgttggtatccagtacggcattgccgctgttttgcagcgttacgatattggtataacccagcgctgccaggcccgccttccactcggccatgggcactttattttttccgcttacatttacaccccgcagcagaatgatccatcgtgccatacccggtcactcctttttcgccatcggtttttttggctttggggcgggcagctccggctccatggccaccagcagttctcgcaggaaagccccatcctccacttcctccaccagcagcatcggtttggcgccggggtagggcggctcctgcggggcatcgggcagcagcgccagcgcggccgggaccggcttgaccagcagacggtcatcgcacagctcggcggcgatcttcccctggtagtagatgatatactcgcccatcatctgccgggtggtgatgccctccagcggggccagctgctccataatgtagctcagatattccttactgcttggcatggggtttcctcctctgggtcggtttggctttcagtatagcacagccgagggactctgtacagggccccggggggcggggccgcaggccgcccgccctccgggcgggcaagcgggcttcgcccgcttcggcggctccgccgccgggcctgcggcccgcctgccccctgcacagtcccaaaagggaaacgcccctcccgcaatgccggaaggggcgcggtttttgggggatcaacccaattgggcggtatccagcgcggcctgccctttcaggaagggcgccagctcccgcaggatctcttccgccccgccggggcagtcgctttcaatgttcagcggcatcagcgggtcatgcaggctcatccgcagcaggaaccagccctttaccgccgggacggaataccgcaggccctcgtagttgtggggcgcgggcacccagcccggctggctggcggcataccgctccagcgcggccagtaccgccgcccccgccgccttaaagtcctccggcagcaggcggaagcgcagctcgcgcgcctccagcggctcccgcattccctccagcaggtcagccagggtacggccctgccgccgcagctgggcatagcgtatcactattttggtggcaaggtacgccccgtcatccaaaaaataattctccttcagggcgccgtggccgctggtttccatcgccaaaagacaggtctccccggcctcattcaggcggatcgcctcattgatgacatttttgtagccccgcttaaagcggtgatggcggcagcccagctttttctcaatgaaatccgccagctggtcgctggtgacggaatcggtgacaatggtactgcccggggcctgctccgccgcgatggccgccgccagcgcgataagccggttgcggcccaactcggtgccatcggcttccaccgcgcctgcccggtccacatcggtatcaaagatgagccccaggtcacagccgtccgccagtaccgcccggcggaggctctccatcgcttccttgttttcggggttcggcacatggttggggaagctgccgtccggctccaggtacacgctcgcggaaatatccgcgcccagcggcgccagcacccgcgtggcatagaagccgcccgcgccgttgccggcatccaccgctattttcagtccagccagcggccgctcgccgctattcaccccggtgataatgcgttgccgcagcatggcggtatagggggtcaagatatcaaaagaggtgagccgcccatgcagccgggccgcttcggggcccgcctccgcccggcgcagcagctccttaatatcggcggattccagcccgccctccctggtaaagaacttcagtccgttgcggttctgcggcaggtggctcgcagtgatcatcaccgccccgtcaaaatcgcagcccggcagcaccgtcgccataaacatagccggggtgctggccatgccgcaatcggccgccacggcccccatggccaccagtccggtcagtacggcccgctgcaggctgggcccggaaagacggctatctcgtcccacggcgatccgcagctcctccgccggtttaccgcagcgctccaccagccatgcggcaaaggcccggccgatctgtccggcggcttcctcggtcaggtttaccggctccgccgctaccagcggcagcgccaccccccggatatcacttccgttttgcagcttactgtactctaccatagtcattatctccttttttgcgtcccactcatacttcatacagggggataactctgctcctgctttttggtgggttaaaaatccgagcccccatctaggatggttccagttgagggctttcatatagctccagtgctgtctcataactggttaaaaatccaggccccggtctgggatagcccctgcaaggggcagggtccgggccgcaggcccggtcgccctgcgggcggccgatgcgccgaaagcgcataccccggcgaagccggggtggcctgcggcccgatcccgttcccctgcacattcctgcaagatttcgttcaaatcccgccccaccgggccgggtcgctgtcaaatacctcaaccggcaaaccgggcagcgccgcccggagctgttttgccagctgcggcatggcagggtgctcggtggcgtggtgacccgccgccatcaggcacaggccctgctccgccgccataaaccattcgtggtgttttacctctccggtcaggaaggcttccgcacccgcggccagtgcttcccccataaaatcgctgccagctccgccgcataccgccaccgtcaggatctcccgcccggtgggaacatactgtatccgggtgttcagtgcggtttcggacatggcggccagcgcctccggccgcatcggccggggcagctcgcccaccatgccgtatacctcctgccggtgcagtgcatggttctgcaggatgctgtatgccggctcctcataggggtgggccgcccgcatcgccgctataacggcgtccaggcattccggggcacacagcatctccagccgggtctcctcggccttttccagcgcccccaccttgcccaggtaggggtgggcccccgcctccggcaaaaagcgccctttgccgtcattcatataggcgcatccgctgtaatttccctgtcgcccggcgcccgcctcgctcatggtacggtacaccgcctcagcatggctttttggcacaaatacaataatggaataccagggcttttccttatcttccgggccaaagggccggatattccgcagtcccagcgtttgcgccagggcgcagttcaccccccgcggcgcaaagtcgtaattggtgtgcgcgctgatgactgagatgccattggccaggcacagccccgccgcatcccgcgcgctgatgtgctttagcgggtgaaaaataatggggtggtggctgacgatgcagttcatccgcatttccagtgcctgtgctaccgccgccggggtcacatccagcgtcaccagaatgccggtgaccgctgaatccggctcccccaccagcagccctacattatcccacgccatgcaccccccaaagggcgccagcatgtcaatggctttgtgcacatttccggctgtgtattccatgtgtttttctccttctatggtaggtgcagggtgcccggttggggccgcaggccaaaccgtcctccggacggttttccgcgggcttcgcccgcgtacggcgctttgcgccgggcctgcggccctggcctgtcccttgcacttgctgtttctctatgcagccgcggcagcgcggctcacacgcccaactcatccaggattcgattcaccgccgccagcgcttcctcccggctcccgtacggcagcagtgtaaagcctcggttgcccgataccatggcggaaagccggcggctttctcttggccggtacaggatataaaccggcagtcccagcgcatgagcgctgcccagctcgtaccccacccccagcgagggcgtactgcactccgctactactgcatcagcctggtgcagcagtgccatgtcccgctcgtagatatcaaagtcggtcatggtcgcggcttctatgtcctccagcgtgctttccccgataaactcggtcagcacctcgctccgctcccgcagccgggcgatcagcgccgcatacagcgccaaatcctcccgcccgccgcggatcgacccggcaaagtaaacccttttcatgctctgctccttctatcacctgtgcagggtgcccggttggggccgcaggccaaaccgtcctccggacggttttccgcgggcttcgcccgcgtacggcgcttcgcgccgggcctgcggccccagcctcccctctgcacaaatccttccatttatcctccccgccgccttacagctccaccaggatgggcaccacatttttgtcatccaggttcagctcgatgtagctcgggtggccctccatcggctggcgcaggctcccgggattaagaaaataccgctcctcccggtattctattttcgccaggtgggtgtgcccatacagtacgatgtcgcagttttccgccgccgcctttttctccaatagcgcggtaccggtagcttttaccccgtacaggtgcccgtgggtgcaaaaaatacggtgtccgcccagctccacgatgcgttcggccggccagtcgcagccccagtcgcagttgccccgcaccgggtaaaagggaatctgcgggtagatctcatgcagatcgtcccattcctccgcgccgtcgcccaaaaagaggaccgctgccgtttccggctgctgctccagcacctgctccgccgcggcaaacgccccgtggctatcgctgcaaatgatgaccttcatccggtgggcaccccctttactcctgctgcatatagatgggaagagcggcatcctgcccgctttccccatcttctaaccaaaggtattttatcatatctttaagcaaaaaggaacaggaggaatgaagaaatggccgaaccttcccgctataccccggaacagctttccatcctgctgcgcatcgcggcgggcaaattggggcgcgaccccgtaaaactgcaggaggagctgcaaaacggccggctggacggcctgctgcagtccctgggtgccgaccgcgaaaaggtaaacgccctgctctccgaccgggagggcctgtcgcagctgctccagtctccgcaggtacgcacgctgctgcagcagcttttggccgggcaggcacccccggagccctgatttgagcagggcccaggtggcggccgccccgttgcccgggcttcgcccgggcagtggcccccctgcggggggccacctacccgcccccgcagggggcgggccgcggggtggccgccttacccgcgccccccgcagcccttcttaaaccgcaggcattgcctgctaccacaccacggatcggagggatcaccatggaggacctgagcgcccggctggagcagctcctttccgatccgcaaatgctctcccagctgggagaactagccgccggattgggcctgggcaacgggccgccgcccccgccgcaggaaccggccggggaagcccccgccactcctgatctctccgcccttttggggatgctgggcggcacaggcggcagtacccagtcccccggcttcgatcccgccctgttgggccgcatcgcccaggtgatgtcctccctttctaccccggaccgcgatacccagcttttgatggctttgcagcccttctgcggggagcaccgccgcaaaaaggtggaggaggctgcccagctgctgcgcatcatccggctgctgcccctgctggaggataagccccccgccggttaaagccgctggggcttttttcatccctgcggcctttgcctggtaaatgcatccgcttgcaaatacttattgctctgcccagctccctcgtaaccgcccttgcaccgcaaagctagggggccaaattgcaagcaaatttgcatgtcccctaccggccaaaggccgccatctcccttgaaaggaggccccctgccatgccgcaatggaagcccgaagatgaagccctcttcgccgagctttgccgccgtgccgagcagcagtctcgggaggccgcgctgcgcgcggccccggcgccgccgcccccgccccccaagggggcggccggggcttttgcccccacgccgcctgcggcggcgggcggcgg

SEQ ID NO: 4503 - DNA, 2737 bp, Unknown
  16S sequences of unknown bacteria
attttttactacttgtttttaagtcggcctttttacgcatttttattcacacttattcctcctgccatacgcatcctcgatccacccgtccagcacctcggcaagcgaacgaaaaccgatctgctgcggcggatatgcctgtgtgtgatgccgtctgcgggcaaaacgctttttccctgcgttcactgccttcagggaaaggcggaaatgaataccgtcttcatcctgatccaggatcttcacccgtacccgttgattcacgctgacaaaggtgtgtacatcacggacataccgctcgctgatctccgatatatgaatcagtccattatggctgctgtccagagagacaaaggcgccgtaaggcttgattcccgtcacggtcccctccacgatgtcaccgacagaatagcgcatgtgctcacctcggtttttattataccacatcttcatgttttttgtggtataataaagcgcgtaaacagaagaatgatgttagaggtgatgatatgataatttccccttcgctttatccgctgatcgcagcgctgctggccaacgtggcagcgcaggtattgaagctgttcaatttctactttcgcagcggccgctgggatcttcatcaggtaatttcctgcggcggcttccccagctcacacagttcgaccgtcacggcgctctccctggccatcggcctgcaggagggattcacttccccgttttttgccatcacttgcatctttgccttcatcgtgatctacgatgcggtcaacgtgcgttattatgccggcaagaacatccagctgaccaaacagctcatcagcgatatcgaggagatgcagaaggtcaacttctccgatccgatctatcatgaaaagattaaggatgtcctcggccacaaattcgtcgaggcgatcggcggcatcctgctcgggctgctcgtcgcattgatcttgtctcccatgatcccgcagtaaggaggaaaagacatgaacgaaaaaaaggttcagaaagtgctcgataagatccgcccctacatccaaagagacggcggggacgtgacgctggatcatctgcaggatgatgtcgcctatgtccgttttcacggcgcctgtgtcggatgcatgtcattagacagcaccttttacggcgggatccgcgacctggaggagctgccgcagctgcgcgatgtccggatcatcgacgatcatctgaattgaccctgaagggcacaaaggcagcgggccgtaatgacccgctgcttttttcatgccggcgcggacagcctgttcagctcttcttccatcttcgcgcggaagcggaactcctcgctgtcctgcatgccgacataatagatgcatccgatgtcttcctgatcgaacaggtagaccgaacgtgaatcgatcatcccttccggatacagacaggcacagtaatcatagatcctgccctgcttcgtttctcgttgtacccttccgcagatcatcactttcttcgtcccgtttttcagcgtgaccacactgccgatcggcagatactctttcatctcatcacctcagtatgtcacattgaccttaaagcctaatcctgcgatgaagcccagcttgctgccgaattcccattctctgttcttatgcgaaaacgagacctctgcttccgcgctgccgatggatccgctgccggtcagcgtgatgcgcacattgaagatcttgagcacacagcggacctcgccgcgcaaggcacagacgcccgcaccggcatggatggtctgctcttccttcgagagcacggcctcggcctctgcatacgcataccctgccgtcccttccgcagacgctgatgcgccgatcagcgatccgcccgtccacacctccgcaccggcctgaagcaaagcggcctgcgcgccggcatacagcaccagctccggatcccactgacgttccttgtcaaagagcgtcaggtgagcctcgcccttgatgcggaagtcgccgagcgctgcagaaatcgctgtgttcaggatgcccagagaatgactcatcaccgccttgagcgccgacacatgaagcgacgcgccgatccctgccccgatgctgccgacccgtttgacccttcctgcccccggatcgatcatatatacattcgtatatgtatcccagaagctgacgtcaacagcggaaaggatcgaggcgcctaagcgctgcagaaggccgttctccgtttgttcgactgcctggatccggctttcgcaatagctgtgcaatcgcgccatgccatcggcaaagcgcagtgcgccgaccgtgcgcggctgcggataacggctgcggatcgcatcgctcagcgcaaggatcgagcggtaagcgtcagtatccgcgtacatcatccatctcccggccgactgactcgatcagcctttcgatcaggtccagcagcgccctgcgctccgtgccatcctgaagacacatgcagtgctgacggcaatcctgcaacaggctgaccacctcctgcaaacgcaggagatggcctggatcaggatacaacagaggaagcctgctgcttcagcatgtgctcagcatcctgatagctgcgggccgtctcacgcagacaggcgacatactgctccatcacctgctcataacggtcaaataccggaagcagctgatcgaagcgctcctgcagcgcagcgcctgccggagaatcccagcagctgctaagctgacgcatcttctgcgtcacggcatcc

SEQ ID NO: 4504 - DNA, 3233 bp, Unknown
  16S sequences of unknown bacteria
ggcaccagcgcagtaacggccacaaacgcggagaccgcaccggcatacgggatcccaagaatcagcattccaaagaagcacagaacgccgatgatgaccgcttcggtaagctgcccgctgacaaagtttgtgaaggtctggttggccagagaggcaatactcagaagccgctgtgccttcttttgcggaaggactgtcacaatgagttttttcaaatgtgctgcaatgacttctttctttgcaagcagatacagcgcaaaaacaagtcccaacagaacatccaccaaaaccgacaggacagaggttgctgcgccccacgtcacggtgaggataccgcttccctcgtcactgagcaaggcggtgaccttctcaatcaacaggtcggggtctatggcgtattcaggcagtacaatgttatattttgcggcaaaccggacaacgcctgcccaccactgcccgatttcctccacataggccggaatgttttgaataaactcgtcgccggactcccgcaggctggggatcatcataaacaccacggcaaacagaatcccaaggacgagtacggtgcttgcggtcaggcacacgggacgggtcagccttgcaggagctttgcggcataccttgttccagcagcattccaacggccgaaggactacgttgatcaaaaaagcaatcgcgccgccgatcagaaacggagtgaacagcgcaagcaccttgccaagaaaacgcaaaacagcgtcaaggtttaccagtgcccacgcaaatacaatcagcagcaccaatgcgcggatgatgtaacgaataatcgccttgtccggccatttgcgttcctgcggcgcggaatcctcgtttttgttactggctgtgttttgcggtttcttcgccatgtttcttcctttccgctattgtgcgcagatccgttcaaatccgaaagcacttttgcagggctttatactcacccaatgccaggatcgtaatgtcatcggacaatatggtgtccggcgtaacagaaacatccgtttttcctgcacgtttgatgccgagaatggtgatgccgaacttcctgcggacatccagctcgccaacgcttttcccgatccacgtctccggcacttctacttcaaagatagcgtgctgcgcgtcaatctctatatagtcaaaaatatgatcggaagtatatcgaatcgccgcccattttgccatctgtttttcagggtagaccacttgatctgcaccgttgcggagcagaaacttcgcctgcacatcgcgttcggcacgggataccacgcatttggcacccaactctttcagcagcgaggtggtttccagcgagttctggaagttgccgctgatggtcacaaagcaaacatcaaaatttccgatgccgagcgaacgcagaaactccgcgttggtgctgtcaccgatctgcgcgttggtgacaaacggaagcacatcgttgatccgttcctcattggtatcgactgccatgacctgatgccccagttgagagagctgcatggcgatatgccgcccaaaatggcctgctccaatcaataaaacatttttcatgggatagatgctcctttgcttatccgatcgtgattctttcctgcggcagctttgcattgccgccttttttgctggacaccgccgcataaatgagcgtaagcccaccgactctgcccagatacatcagcgcgatcaataccatttgcgagggaatgtgcagctgcggcgtaatacccaatgtcagtcccacggtgcctactgccgacgctgtttcatacaggcaggaggacagtgggagattctcatatacgctgataaaaacgcctccgccaaagaacagcgcaaggtacatcgacagaatggtcgcggcggttttgacggcactgcaatcgactctgcgcccaaagaattgggcgctgtcccgctggcggaaggtcgcggcagcattggcaagcagaactgccagcgtggtggttttcatgccgcctgccgtggagccgggagaaccgccgatgagcatcagaaggatcatcacgcccaacgatgcgccggacatggcgggtagatcgactgtgttgaagcccgccgttctcggcgtgaccgattggaacagggctgcctgaacccgctctctgaggggaagggcatcaaagtccacaaagaagaaaaacagcgccggaaggacgatcagcgtgagtgtcgtaacgagaatgaccttactttgcattcgataacggtggaaatgtagcttgttttcgcaaatgtcatcccatgtcaaaaatccaatgccgccggttatgatcagcagcatgatcgtgatattgatcaccggattttgaacgtaaccggtaagggacggatacaagttgccgttcgttcccagaatgtcaaaccccgcgttgcaaaaggcggaaatcgagtgaaataccgccatccagatcccgcgccatccgtagtcccggcaaaacaccggcagcatggcaagcgcgccgatcagttcaaccagaaacgttcctcgtagaatgaagcgtgtcagccggacgatccctccgaccctcggcgctgagatggcgtcctgcatggtgctgcgctgcatcagagagatccttcgcccggacagcagcgcaaacgatgccgccacggtgacaacaccaagcccgccgatctgaatcagcgtcaggatcacagcctgcccgaagaccgaccaatagctgccggtatcctgcaccacaagccccgttacacaaacagcggaggtcgaggtaaacagcgcttcatggaacggcgttacgcccccagctgttgtggagagcggcaacattagcagcagtgcgcccagcaggatcacccctgcaaagcccaatatgatgatttgaaaagacgaaagacggcgctttctgcaaaccacttcttccgacatcatcctcactccttgtgaatcgtgcgatcgctttattgtgcgcaagtcaaacaggcgccacattgcctgactgtgatgaaggataccctgtacgcactcagatcggagaccgtgatctccaaattctgtacggtaaaggaatcgcccttgatggggactctattcagctgctccatgacccagccgccgacggaaacactgtccgattccagcttgatgtcaaagaattccataaaatcctccaagctgacggagcagtccacgcggtaggtattctcgtccagcttttcaaaatcttctt

SEQ ID NO: 4505 - DNA, 30964 bp, Unknown
  16S sequences of unknown bacteria
gagcatgcggttcatacccgcagtgtcgttggttcaaatccgactaccgctaccaggcgccttttgtctgaggcgcttcacggcccgatggtcaagcggttaagacaccgccctttcacggcggtaacacgggttcgattcccgttcgggtcaccatctggctgctgcaatagcggcggctgaaatgggcgtatagctcagctggttagagcgcctgcttcacacgcaggaggtcagcggttcgagtccgtttacgcccaccaaaaaagggaagaagccccgcacgctgtgcggggcttcttccctttgagcgtgagagccgggctcgaaccgcgacggttctgagccggtcccgcctcttgcccgatgggggaaacgatccgcacaacatatccgcgccggatgacggcaacacacgatttgtaatccccctgttccggcatccgtgccatcttgccataacaacacggccgggtaccccagggtacccggccgtgccgatgccgcattatccgattttaccgcccttcgctccgccgagacggaccgaggcgagaagattcgaatccacgctgaaggtcagggcctcccgctccctcgcgcgcttgaaggccagggcgatcatctcgtcgaggagcgccgtgaaaggggtacctgcggcttcccacaggtaaaaggccagggagccggggatggtgttgatctcattgacgaacagctcgccggtatcgggattgttgaggaaatcgatccgggaacagcccgaacagcccagcgcctgaaaggtccgcaccgcgagctcctgcaccctggcggcaagctcctccggaatatcggccgggcagcggcgccccaggctggccatgccgcctgatttggcgccggcctgtttgccgccccgcaggtacttgtcctgataactgaggatctcgtcgcagccggacggctcttcgcagacggaagcgcgggcggtgtcccggtcgccgagcaccgcgcagttgagctcccgcagggggacgatggcccgctcgatgagcacctcggccgagaagctcagtgccagatccagcgcccggccgagagcgtcccgatcccccgctttggagatgccgaccgatgaccccaggttgaccggcttgacgatgaccggatatgggaacgcggactcgatccggctgacagcggcggcggtatccgccgccacttcccgtccggagaaaagcagggcgtccaataccggcagcccggcctgacgcaaaacggctttcattttatatttatccatgcccagggcggaagaggtcacgtcgcaggaagcgtacggcacaccgagcatctcgaggaagcccatgagggtgccgtcctcggtattggtgccgtggaccaccggcagggccacgtcgaagctgtccaccacattgttcccgaatttcttgaagggatagcggacaagttccacccgccccttttcggcgggaacgggcagtacccgggtggccgtggccaggcaggccggcatatcccggtaagaggccacatcccccatgtgggggccggtgtagaaacggttgtccttggtgatgtacaggggtatggggacgtaccgggaacggtcgagcgcggcaaaggcctgcagccccgaaatgatcgaaacctcgtgttccacactctgtcccccaaacaggacggcgacgcgcgtttgcataaccaaaaactcctctccgcggcagtatggcatcattcaaaattatccggcaaatcgttttccagcagggtgatccggagtccgggggcgggcttttcgcgcaggtgggcgagccctgcctgcagggtcggtgcgacgaagatccgttcctccgggaagccgccggcgagcagcccctccttcagcggcggggcctgccgttcccctacgaggacggcataatcgcagcgggcggcggcgtattccccgagctggcggttgagctcatcctgtttatcccccaattcgaccatgccgggggtgaccaggatccgctcggcctggaatccggccagcacatccagggcgctgcggaagccggcggggttggagttgtaggcgtcgtcgatgatcccgccgggcaggagctggagccggtgttcgacgggcttgagcatccgtaccgggtagacgagatcctcgagcgggatgccgagctccagtgcgacggcgatacagccggtgatgttctggacattgtgcaggccgagcaggcgggtggtgaagcggcgggattcccccccggccgtgatcaggaaggaggtgccggccccgtccacctggatgtcggaggcggtcacatcgctgaggcccaggccataggtggtcaggggggcggaaaagccgccctccgccagccggaggcggatgtattcgttgtcggtgttgagaaagccacggccctccgcgggcagggcgtcgatgagctcaaatttggtcttgacgatgttttccaccgtgcggaacgtctcgagatgctgttccccgacggaggtgagaacgccgtaccggggatggaccagatcacagatttcccggatgtcgccggggtttttagcgcccatctcggcgatcaggacctgatgggtcggccggagcgactcccggatggtgcgcaccactcccagggtggtgttgtaactctcgggggtcatcaggacattgtatttgaccgaaagcagcgcatggaggaaattcttggtgctggttttcccataactgccggtgacaccgatcgtcagaagccccggcatggcctcgagccgccgccgggcgtccttcacataccggttcgcgagggccttttccagaggaccgagcaggaaattcgacaccagggtccagacccagaccaccagggaatagagcgccgccatgccgatgctccgcatccggtcgacgaaaaaggcgccggtgaggaccaggagcaaaagcagcgcctgcatgccgagcaggcgccagacgcggtgggtgaagaccagcggctttttggcctttttgggtatgttgagaccggcggtcagaagcagcacagccccggcggcgtaataggaatagacgccgggcagccacatgatcggcagcagcagggcgggcagcagccggcgaaggttgaccaccttctcctcgtgatccttgcaccatttgcggtaccgctcgttccgataggagttgagctgcatcatgtgggtgaaatacaccgtctgcaccaggacgcagaccgcgcaggacgccagcatgacgattttagcaatgagttccaacggcggttcctcctgtccgatggggtttcggggcgctcggctggaacggatggccttatcccagaaacgagtcgagtacccgggagcagatgccgaagctttcggcaaaggcgtaatggccgccaggcagctcgaccaagccggcgtcgggaagcagcgcttccatccgtttgccgtccgcgaggggggtggcggtgtcatccctgccccatatcaaaagggtggggacggcgatgcggggcagcaggggcgccatatcctccccgagggccaggaccatgcattgccgcatcagggggctcgccttggcgtagtccgccgagccgaaccgtttttgcgcgttttcgacggcgtgagggaacagcgagcggacgccgggcaggcggaatatggctttcgccgccttgtaggtatacaccttgaggtaataacgggggccgtgccggggtttgatgccggccgagtcgatgagcaccgccttctgtacggcgaggggggaagcggacctcgccatcagcttgatgaggatccggccgccgttcgagtgggccatgcccactacgtcccgcaggcccagcttttcagcgaagtgttccacaaaatcggcgtagccgtcgggtgtccagggaaccggcggttcctgcgagcctccgaatccggggaggtcggggatgaccacgcggaagcggccggacagatggtcggtgatcaaatgatacaggctgccgtccacgccccatccgtggagcaggagaaccgtcgcgcgcggatcggccgggccctggtcgatatattggatatgcaggccgtcgacctcgatgtccatagcggggctcctttcgcttgaaatgggggcataaaaggacaggcggccccgaaaaagccgaaggcacgccgggggaccgtgagccggcggggctctgtccgggatccaaacccgggaacggaacccattgtaccataatttgggcgggtgcgcaatcggggagcgcccatttccacatatatgcggcggcagggcatcccatgcgtaggcgggcggaaaccggcggccatccatctcccgtatagtatagccccaaggctgcgtgaaaaatcgcgcagggcccggaaatcggacgcctgcgcgatatgcctcccgtttatcccccgtacgggacgagttcgatgctgtcgatggtgacgtccttgaggggcttgtcgttgtcgtcggtggataccttggcgatcgcctccacgacatccatgccctcgatcacctgggcgaacaccgtatgcccgccggttttcctccaggcgccgtcgagactgatgttgccgccgtgcttttcatacaggtcccatacttcggacgggatccagtcatagatatacgtttcggtgtattggctgttgtaaaacgccttccaatccttgaactggctggtgaactggctgccgtacatcccggcgagctgattgtaactgtctttaaactgctgctgcatggccttttcggtatagtcgtcccgggtgccgaaggcggcggcgttgctctggttgatgaaaaactggctgccgttggtattcgggccggagttcgccatcgaaacggcgccggtgaggttgagcagcttctggtcgaattcatcctcgaatttgctgccgaagatgctttcgccgccggtcccgttgcctttgggatcgccgccctggatcatgaagtcctggatcacgcggtggaagagcaggccgtcataatagcccttttccgcatgttccttaaaattctgcaccgctttgggcgccgcctccgggaagaagcggagggtgatgtcgccctttgacgtatgcatgacggcgacctgttcaccggcggctggcgcctcgagctggaagccataggctttatccgcatattgcgtaccgatattgttcgaaggctcgctgccggaggagcaaccggccagggaaaagagcaaaaacgccgacagaacggcggatgccgcacggatggaatgcctcatcatcttacacgttcctttcttacagtaggggggcccgcggcagccgtccggatcatgaatccgggtgaatggctcggcggcagatgggcggacggaccgactccaggtggagaaagcggttgacttcgtcgatctcacgcgactgggcgtccaggaacgcccggcaggccctgtccgccgcgaggatccggcccgcccgccggacgagtcggacaaaatcccggcggagcggcacccgcgccgcctgccgcaccaggggacagatccggtaagcgcgtgggtcatacaccgcccggatccggccgtcccgcgtcagatagggaaaaaggggaaagatccggcagcagaggggacgctcatcccgccggcagcggccggagcagaccgcgaggtccccgggatagagggtaaaccctccgcggggcaagccgtcttccccggtttttaacgtttcccccgggaacaggcgcatgccgaagggctcctcaccgtccggcgcagcgcagcaccgtcctccacagacccgcccgcagtcggatccaagcggggtgacggaccgcagaagagcacgcgccccggcgacggcgggattcacgcgaattcccggatgtcgatggattccatgacgacatcctgccggggcttatcctgcggcccggtttccacggccgcgatggcgtccacgacatccatgccgtcgtaaacctggccgaaaaccgtgtgacggaaatcgaggtggggcgtaccgccgacctgttcatacgaggcgacgacctcttccggatacccctggttggtcaaacccttcatctgcccgatcaggcggggatccacccggctgcattgcacgatgaaaaattggctgccgttggtgttgggaccggcattggccatcgagagggcgccgcggtaattccgcagttcgatgtcggtctcatcctcgaagctgtcgccccagatactttccccgccgcagccggtaccggtgggatcgccgccctggatcatgaaatccggaatgacccgatggaaaatcaggccgttgtaatacccatttttcgcgtgggtcatgaagttttcgcaggttttgggggttttgccggggaaaaggcggatggagatatcccccatgctggtatggatgaccgcgacgggctcgcctttctgaggccgatcgagctgattcatagcgtatctcctttgtcgcggaccggatggaggatccggtcctgtaatgggaaacgaaaagcggcgcccggcgcaggccgcgcgtttgggagtgattgcccgcggaggctggttccggttcgagcaactacccggaggaagaccggtgccgccgggcggcaggatggcgcttcgcgccgacagggcgtcttctatacgaagtttagcttaaattagtatgctttgccccacaccaccatgtgtttggcgggcttgccgcagcagacgcaggtatcgcccagagactcctgttcgaagggcatgcagcggctggtgacgcccgcctcttccttgagcctcagctcacacgcctcgtcgccgcaccacatcgccttgatcaggccggggcggctctgggcgatgtcctggagctcctcaaaggaagcggcggtataggtcatgctttcgcggcgggcgagggctttctggtacagcccgtcatggacggattggagcagcgcggggatcgcggcttccagttcgtcgagagagacaaacgtcttttcccggttatcccggcgcacgagtacgcactggttgttttcgatatccttcggcccgatttcgaggcgcagggggacgcccttcatttcgtattcggcaaatttccagccggcggaattgtcggaggcgtccagcttgaccctcaccgtcttggagagccgcgcgcgcagctcttccgccttgtccaggacacccggcttgtgctgggcgatggggaggatgaccacctgcaccggtgctaccgcgggggggagcaccaggccgttgtcatccccatgggccatgatgatggcgccgatgatgcgggtagacatgccccaggaggtctgatggggatattgcagcgtattgttccggtcggtgaactggatgccgaaggcccgggaaaagccgtccccgaaatagtggctggtgccgctctggagagccttgccgtcgtgcatcatcgcctcgatggtgtaggtcgcttcggcccccgcgaatttctccttgtcggttttccggcccttgatgaccgggatggcgagggattcctcgcagaaatccgcgtacacgccgagcatccgctcggtttcggccatggcctcttcagccgtttcgtgcatggtatggccttcctgccagtaaaattccatggtgcgcaggaaggggcgggtggtcttttcccaccgcaccaccgagcaccactggttatacagcttgggcagatcccgccaggaatggatgatgttggcgtaatggtcgcagaacagggtttcggaagtgggacgcacacacaggcgctcggtcagttcttcttccccgccgtgggtcacccaggcaacctcgggcgcaaacccctcgacatggtctttttccttttgcagcaggctttcggggatgaagaggggcatcatcacgttttcgtgcccgagcgccttgaagcgcgcgtcgagatcgccgcggatgttttcccacaaagcggtgccgtaggggcgcacgatcatgcagccccgtactcccgcataatccaccagctccgcttttttgacgacatcggtataccactgggcgaagtccacgtccatcgacgtgatggcctccaccatttttttgttgtccgccacaaagatccctcgttcttttcgttatttcttctcgttctgatccggtttatccttggcaaatttgttgagcagggcaacggctgccatgattatgcccatcaccacgaaaatcccgaccatgccgagcagcatcagcagcagggagctgagcaggttgttggtttgaaatacgatatccatgaatgatcctccttatccggtcagccgccgatcaggcggggaaccactgtcaggatgatgccaccggccaccacggagccgatctgtccggccacattggcacccacggcgtgcatcagcaggtggttctggttatcttctttgagggccattttctggatgacccgggcggacatcgggaatgccgagatgccggcgccgcccaccatcggattgattttcttgtctttgggcaggaacaggttcatcagcttggcaaacatcacgccgccgatggtgtcgaacacgaaggccaccaggcccaggcccatgatgaccacggtacccaccgtcaagaaggcgccggccttcatactggcggcgatggtcaggcccagcacaatggtgataaggttggccagggtggtctgggcggtctgggagagactgtccagcttcaggcattcccgcagcaggttaccgaacatcagcatgcccaccagggaaaccgaggcaggtgccaccaaaccggcaatgacgatcacgatgatcgggaacaggatgcgggtccggcgggagaccgactgcggattgtagggcatccggatctgacgctcttttttggtggttacggccttgatggcgaccggctgaataatggggaccagcgccatatacgaataggcggccaccgcgatcgcgcccatataattggatttgaacacttgggaaaccaagatggcggtgggaccgtcggcggcgccgataatcccgatggaggcggcgtctttgaaatccgggaacatgaaggaagcaaccagcactgtcaggaagataccgaactgggccgccgcgccgaacaggaacattttggggttcgagagcaatggcccgaaatcgatcatggcgccgatgccgataaagagcagcagcggcaaggcctccgaggcttcgatacccacctggaacagccagtcgatgatgccggggacctcttcctccaaagccgcgttcatttgattgatagcaccggataagggcaggttgaccaggatggcgccgatccccatgggcatgagcagggccggctcgaaatccttggccagggccagatagatcagcaggccgccgatcaggatcatgacaaaatgcttccagcccggaaccattaccaacttttcgttgatgatttcctcatgggacgagaaaaaatacaggaccccgtcatacaggaagcggaaatgctctaaaaactccaacgcagactctcctctattatttggtttcaaatggtcagttttctattatataggaactcctgacgattttcaactgcaaactgtgtgaaaacagcggtttttcaaattctttgccccgttttgccatttttccggttccggattttccagcaaaaaataggtcgctcgcggaaaaagacttgacgtaggcccgcctgccgatgcatagtataaagagtcagacgaaatcgacggggtgatatggaatgaaaaaggcagtcctgtggaaaagactctattacgcggcgctgcttgtctatgcggccggcgggctcgctatcgggttattcaccgctttcgtgacaaaggagcggccgtttatgggatttgtggggctgttgtttttgccgcttccctggctgatccggtttgttttccggctgaagcccgcctatctggccgacacctgcctgctcgcctttattttcgcggcgttcgagctgggggtggcgctgagctggtacagccggtttgcgtattatgatctggtcgcgcacggcgtgagcgggtgcgtatttgccgcggtgggcctgtgcggattttatcttctgcgggaggataagcgggcgccgatgaaaaaggaccgcctgctggccgtttccttttcattcctgttttcgatgaccgccgcggggctgtgggagatcgtggagtatgtgatctatctgttcttcgggaacgactcgcagtatgccgttgccccttacgccggctttaacggtgtggcggatacgatggaggatatgatgatctgtctgcttgggacggcggtgatgtgcgcgctgatgtggatccatctgggcgggcgccggattgtgcttgtcaggccggtcgaccagtttgtggaggcgaattggggggaaagcacgccgccctcaccgggggacgacggagggcatacggaggactgaccgtccttcacacggacggctctatggaaggaaaaagcgggggacgcagcgcgtcccccgctttttccttccatgccgggcctccggctatgcgcgcagcacatttatcagggtcagacaggcacaaatcctctctttccgacatatatataagagtcatgaaacggaggagaggctatgctgctggaactgttccattccctgtccaacattttctatatggcgctgcatgtggtcaattcgggctccttccccaaaccgctgagtgcggaagaggaacgggaatgcctggaggccttccgggaacggggcgacatcacggcccgcaaccgcctggtcgagcacaatctgcggctggtcgcccacatcatcaagaaatactacagttcggtccgggatcaggatgacttgatctcgatcgggactattgggctgatgaaagcggtgagcaccttcgactattccaaagggatccggctcgccacctatgcctcccgctgcattgaaaacgaaatcctgatgcagttccgcgccaacaagaaaacggctcaggatgtctccatcatggaacccatcgacacggacaaggacggccatcccctgaccttgatggatgtcatcgcccaggatgataccatcatcgaggatctggacttgaaaatcaatgccgagaagctgtaccgctatatggaggagatgctcgacgaccgggagaaggagatcatccgctggagatacggccttatcggggacggcctgacccagcgggaggtggccaaaaagctcaatatttcccgctcctatgtttcccgcatcgaaaagaaggcgttggaaaaactgaaaaagcggttcgacgtgggggacaggaagggctgtgccccggccaaaagacggccgtagtgggcggctttcctcagtctggaaaaaatggagaatgtatagacaaatggggaagcgatgcgatattccagaaccatatatccgaggacctgtgcctcggatgtatcccatatagacgataaaacggccccaatgccggcattggggccgttttataagtgagggtggttctggcgggggacaaagagagcaggccgagcttggagacgaagggattcaccccccctcgtccggccgcgtgtcgattttaccgacacgctccggaaaggccggggatattttccccggcctttccggatgtcaggcgatggtcacaccggtatagtaatgccggaggatgtcatcccaggtgaagccctgccgggccatataatcggcgccgtactggctcatcccggccccatgcccgtagccctggactgaaaaggcaaagccgtcttccccgtaggcgacggtgaagcaggcggaacgcaggccgagggcttcccggatctgccgcccggtcagggcctgccctccgacggtcaaagccgtgacggttccggcaggggagcaggccggttccccggtgatccaccccgctgcgtccccttccagtttcaggccggagacggcggcggtcagcttggcggagaattcctcggcgggaacggtaacatccgactgataatcgggggacagcttgtcacccgggctggggaccgactgcagatacgggtaatcccggccccaaacggttccggcggtttcggtggtcccggaattgatcgcgtgataggcggcaaaaatcagcttgtcttcatagagcagccgtttccccatcacctcgtccaccgcggcggacattttttcgtagtaggcgtcgtatttgttcccccatcgctctttgagcccgtcgggggagtagatggcgggaaaggtctgcggcaggttgccggaaaaatcagccccctgcagggccggatccggtttggacgcattctgctcccgccggtagctgtaataggtatatgccgccacggcctgggccttgagggcctcgggatggtaggtggccggcatttcccccgcgacggtatacaggacgaaatcccgttcggagtaggtgtacaccgtgccgctcgcctcgtcgaggactttgaagaccgcctgctccgtctccacgccggaggattccggaaggggaggtgcggatgaggaatccggcggagcgggtaggggatcgccgccgagaattcccagcgccggcaagggaaggaggaggagcagggcatagcagcacaggatcaaaagggcgtaccgtttcatggtttctcatcctttccagatggataaaaggaacacgaattgatggatgaacacgggttcgattcaaaaagatgcgatttagaccccttaaattcggtgaaaacgctttaaaaatgaatgatataaacagaataattgcaatttattggcatttcacttgacttcgccgttggaattggctataatgacgtttacggcccacacagtctgaggaagggagcgaccgacatgcatacggacggcaggttgtccaatgccacctttacatccttatgcgaggaatttcagaaaaataaccggatcgatccggccaaattcgagcagtacgatgtcaaaagagggctgcgcaacgcggacggcagcggcgtcatggcggggctgaccttgatttgcaacgtgcacggctatgtcctcagcgaaggggaaaaatcccccgtggaagggcacctgaattaccggggcgtggatgtggaggacctggtccggggaagcgtggaggacaaccgcttcgggttcgaggagacggcgtggctgctgctgttcggccggctgcccacccgggaacagctggaatcgtttgcctcgcttctgtccgaatgccgggagcttccggactattttgccgaggatatgatcatcaaggccccttctcccaatatcatgaacaagctggcccggtctgtcctcgccctgtattcgtacgacgacaatcccgacgatctctccaccaaaaacgtgctgcgccaatccattgagcttattgccatgcttccgaccatcatgggctatgcctatcaggtcaagcgccggcactatgaccgggaaagcatgtatgtccatccgctcgagcccgggctttccacctccgaaactatcctgcgcaccatccgtgccgacgcctcgtataccgatgaagaagccaagctgctcgacctgtgtctgatgctccacgccgagcacggcggcgggaacaattccaccttcgccgcccgtgtgctgtcctcttcggggaccgacacctattcggccatcgcggcggctatcggagccctcaagggccctctgcacggcggggcgaacatcaaggtcatggagatgctggaggcgatcaaggccggggtgggggattgggacgacgacgatgaggtcacggcgttcctcgaaaagctcatccgcagggaggcgggcgaccggtccggcaaaatctatgggatgggccacgcagtctacaccctatccgatccccgggcggtcatactcaagcggcacgcccgggatctcgccgagaaaaaggggtatggcgccgagttccggcttttggagtcggttgagcggctcacccccggggtattcgcccgcctgaagggcaacgataaagcgctgtgtgccaatgtggatatgtattccggcctggtttaccggtctctcggcatcaatcccgacctgtttacgccgttgtttgccgtggcccgtatgcccggctggtgcgctcaccggatcgaagagctcctcacgggcggccggatcatccggccggcgtataaatcgctgtccgtccggcaaccctatatcccgctggatcagagaaaaaacggataggaaagaccccttttcatccggcgcaaagtatgatatgataatccggaggcaaagccccgctttgcctccggatgtattgtatacggaaaatgacgggaaatcgggtgtactcatgcagagacattataaaaacgcggccttcctcaccaccgcgatggtggccgtcgtcctggcgctgcgcgcctggatcacgccccacatgctggaccggcaggatgacctctaccgtttgagctacgtcgtcatcgccgtcatggcgctgaccatactgggagtcctgatctggacaggccttcgccgtcaggagccgctgcaggtatccggcctgtggctgaagccggcggccgtcctcggcatgctggcgggcgcggcgctggtgctcacctgcctgtttgacgcatggaactggctgctgggccatacgcctcccgccccggcggtggaaaccgtgggtgtcgccggaggggtggtgctggggctttcactcctcttcggattggcgggaggcgccttcctgttccgaatcgggctgctctggctggaggaggatggcagccgcccgggcgtgtaccgcctgtgggcgctctgcccggtcctctggatctggatgcggctggcccggtatgagatgtcttacgtcagcgccatcgatgtctaccgcagcttttacgatttcgtcatgctgatcttcatcatgctgtttttcctctttttcgcccgctttgccgcgggagtcggaaatccgaggccgcggcttctcgtgggggtttccctgtctgccgcgctgtgtgcgttgaccggcccggcaacccatttcattatgttcgccatggggaatccggacgccgccgaggcctgcgccctcgcgacgccggtggatttctgcatcgggctgttcgcgctcgcctttgcctatgcccaggcttatggccggccctatgccccgcagccggcggagcccgagcccgacccgccggccgaaccggaaagggctgaggaggccgtgtccgcgcctgaaattccgccggttccggagtcccaatggacccgcaccgagatccccgtggatccccaaccggagaagcagccggatgtggaggcgatcctcaaggactattcctccaaaacggaatagagcccggtatacagaggggacaggggattggccagcagttcctccgccgaggggcaggagaaacccgcggttcctgccgccggacgggcggagaagcccagtgccgataccatgaccggaaatggatgaagggagtccgccgagccgcacgggcgcagaaaagcgccgccgtgccgcgcggcggtttcttttgccagtgcggcagcggccggatacccgccggcccggtcggaggcacagagcaggcggagcgtgcgcggcgagacctcgaccgacacgtggacggcctgcgcgccggccaggcaggcgtcccgcagcagcgcgaggagggtcagctgcgccattcggggctgaaacacgctgcgaaagggacgggtggagagggaaagcctcacgggcaaggcgccgcgcagcatggttttggcgccgcggagagtcgccgacaaaaagcggttcaggtcgcccgcgagcaatggacggccggccgcgcggtagacgagcagggccgcgatgtccaaatcccagcaggcggacagggcccgccgggtccgaaggcgctgggctgcgttctgctgctccagcggcggcatgctcagaaagtaggcggccagacgttcacgcagttctccctcccgccggaggagagcggcgggttcttctatatcaaacgcatcggttgcggttatcatgcgaattcaccgttgtcctataaaatactttggcgttattatacccctttttcgcggattaatcggcggatttgtggaacctcacaaaagtatgaactggcagttaatttattgacgaacttcttgaaaaaaaggaaagaaacgggtaaaatgatacaagattaaactgatggaggtaatagaattatggcagtgaaagtagcaatcaacggcttcggccgcatcggccgtctggctttccggcagatgttcggggctcccggctatgaaatcgtcgcgatcaacgacctgaccgaccccaagatgctggcgcatctgctcaagtacgattccgcccagggccgctatgagaaggccgacaccgtgcaggccaaggaatcgtccatcgtcgtggacggcaaggagatcaagatctattccgagaaaaacgcggccgatctgccctggggtgaaatcggcgtggacgtggtgctcgaatgcaccggcttctactgctccaaggacaaggcccaggcccacatcaatgcgggcgccaagaaggtcgtcatttccgccccggccggcaacgatctgcccaccgtcgtcttcagcgtcaatgaaaagaccctgaagaaggaggataccatcatctccgccgcctcctgcactaccaactgcctcgcccccatggcggatacccttaacaagctggcccccatcgtcaagggctatatgaccaccatccatgcctataccggcgatcagatggtcctggacggcccgcaccgcaagggtgacctgcgccgcgcccgtgccgccgccgtcaacatcgtcccgaattccaccggcgccgcgaaagccatcggcctggttattccggaactcgccggcaagctggacggcgccgcgcagcgggtgccggtctgcaccggttccaccaccgagctgatcgccattgtcgagggcaaggtcacggccgacgatgtcaacgctgctatgaaggctgcggcctccgcctccttcggttacaacgaggatgagatcgtctcctccgacgtcatcggcatcacctacggttccctgttcgactccacccagaccaaggttatggatatgccgaacggccagacgctggtcaaggtggtctcctggtacgacaatgagaactcctacaccagccagatggtccgtaccatcaagtatttcgccgagctgggctaaaccccggacggccagagctttaaaaccgcgcttacttcaggacggccctccgtacggagggccgtttttttattcggcgattcctgcggcactgctgcggtccggctttctattcaccagcggttgatggaaaccgttaccggtcaatcgcggcaaaattaatcaaaaaattacaaattcctttgctttttgcacaggctatgctatactgtccaaaaacagacggaaaaaccggaagaatatcatcgggatgatcaaaaggcatttctgggagagtgatttttgcatgcataccaggcgggaccaggagaagaacgcggaaaaaaagggcttcattgtgctgatttttgccgtgttgtcggcgttggcgatcgcggcgcccctgaccatgaagctggaggaaaagggcgttattgagtcggccgcggcgggaatggacttgggggagccgccgtttcacaccggctttctttccggggtactcaacagcatcgagcggttcaaatggggcgtgaagaacgcctacacgaattatatgccgggctattcgcagatggtggtcacctgtaacgagttcctgcaaaagctcaataagccgttggagtttctcaagacctccgaggtcgattatccgctagacatgccgccggaggaagaggatcccatgaccccgcccggcagcagcacgatgggccgtcctccggaagccagcagtccgggtacgccgggcgacagcagtgcatccgtccatccgccggaatcaagcgatccgggcacgccgggcgacagcagcacatccagccgcccgccggaatcaagcggcccggatacgccgggcgagagcagcacggcgcccgccgagccgccgcagcctcctgtcaaggccgtagccagcgtgaaatcccggtttttgaaggcggattctgtccatcggcattatctggtgaatgtcaaggatacgctggggaattcctattcctttatcgacacggcgctgacgcttccggatgtccggaaaggcgaggtcgtgcggaaacaggcggaacatatcaaccgcttttacaacagcgacaaaaacgtgaatttctatctgtatgtggccaagcgcatgcaagacacggatttctatgaaagcatcattccggacgaggcatccacaaagccgtattacgatacctttgtctccctgcttgacccgggtatcacctatgaagcctttgaacttccggatgtcttttaccgccacgattatgtgtggaaaaccgatcatcactggaatgccgagggttcctatgtgggctaccggcagatcgtcgagatgatgcgccgtgatacgccgtccatcctgccgccgcgggagccggtgtccaaggagatggtcgagggcagccgtttttacggcagctttgcgcgctcctgtgcctatgcaaccatgtgggacgatttcggcgccgttaactacggcctacctgcccacacgattgcaccgacatacgatttcttacagaccatgcagaacctgcggaaaaatccgccgacgagaatcaatcagaacatgtatgccctctgttatccctatatctcccgcctctccttcccggaaaatcacacagggcgcaatctgctggtgatcggcgacagctatgcgaagggaatcgcggaggcgctgggttccagtttcgacaacacctatctgtattatttcaattcctattcggggctgaattacaacaaggtgatccgggacaatcaaatcacggacgtgctcttcctgcaattctccgagcggatcgtttttgatgccctcggcgataaccggttcaatacgatcaggacggacggttaacgataatctgcacgttttatttcaggtaaaagggtgaggggtcggcatgctgttctcgtcattggagtttctctgttttttctttcccgtgttttttctggtctattttctggtaagccgtctgtgcaaaaaggcggtttggccccggaacgcggtgctgctggtattttcactggtgttttacgcgtggggagaattgtcctatttttggctattgatgctgtccatcggtatcaactatgtctttgccctgctcatcggcaggtgtaagcccggccccaataccaagggcagccgggccggcgccaaggcgctgcttgccggcgatgtggcggtcaatctggcgctgctcggcgtgttcaaatacgccggtttggccgtcacgacgctaaataccatatgcggcacggcgttcaccgtgccggaaatcgcgcttcccattggtatcagctttttcaccttccaaatcatgagctacgttatcgatgtctaccgggataaggtggcgccgcaaaagaacatttttatcgtggcggtttatctgtgcgcgtttccgcagctcatcgccggccccatcgtccgctattcggacattgaagagcaattggcgaaccggatggaaacgacggacggcgtttatcgcgggctgaatcgatttattgtggggctgtctaaaaaggtcatcattgcgaacacctgcgcggccctgtgcgacagcctgtttgccacggagatttccatgttcggtgccgccggcgcgtggatcggaatgttggcgtatacgctgcagatttattttgacttctccggctattcggacatggccatcggcatgggactcatgatggggtttgaatacaaggagaatttcgatcacccctatgccgcgatatcggtgaccgacttctggcgccggtggcatatctctctgtcctctttcttccgggaatatgtgtacattcccatgggcggaaaccgtgtttgccggggcagatggatgtttaacatcctgaccgtctggatgctgaccggcctgtggcacggcgccagctggaattttgtgctgtgggggctgtattacggtgtgctgctgctgctggaaaagaccctgtacggcaaatatctcgaaaaaatcccggtgctcaaccatgcgtataccctgctggcagtggtatgcggctgggtgtttttccgcttcgatagtctcgccgggatcgggcagatgttcaaggcccttgtcggcggttacgggtttttcgggctggaaggaaacgcgatgaatattctgggaagaagcgggctggatatgctcttcgttctggcttttgtcgccggagttgtgctcgctttcccatggttcaaaaagttcgaacgggacaaccgccgcctgccgactgttgtgagaagtgcctgttcagcggggcttctggttctgtgcatcattctgatcgaaatcggcgcttacaacccgtttatttatttccggttctgaagccggggcaggctgactatcaaaggacacggcaatttccgaaaggaagctgtcgtgtctttttgtcctgaatggcatgacagggtttggggaaatccggtcggatcggggataaatggacgctgaatatatgaaaagtcaaatttcccgcagcggggctgttttttccttaagaaaaccttgagattttgagagacgtatagcctctggcggcaaaatccgatacaatatcaaatgggatggacatccaatggagaaaatacaggaggaatccgtatgcatagaattttagatcaataccggcgccagatcctgttgcgggtggttgccggtgcggcggggctctttctgctcgcctggggggtgatcccgctctatagcagccggttccatatcggctgtctggtgctgatgctggcggggctgctgcttttgggggcggcccttctgtatccggccctggcccggggaatccgccgtttgtggaaacggcgggccggccgcatcacgcttagcggtataggcgcggccgcctgcctgctgacgctgctgttcctgacggtgtcgggggtcatgacggcggcggcgtgcgccccgcctcccgaaggggcgacggtggtggtgctgggtgctgccctgcggggggagcagcccagccggatgctggcggaacggctgaaaaccgcggccacctacctcagggaccatccggaatcgtcctgtgtggtatcgggcgggcagaacgacgatgaaatcatctcggaggccgaggcgatgaaacgctatctcgtcgggctcggtatcgaggagtcgcgtatctatttggaggaccgttccacaaatacggaggaaaacctgcggatgagccgcgacgtcgtcgagcgggaggggcttccggacgcggtggtcgtggcgacgcaggaattccatcagctgcgggccaggatccatgcggaagaagcgggtttcgaggaaatcggggcgttggcggcacggacgccttggtatctgttcggcggatattggatccgggattttgcgggggtctgccgttatttggtactcggatactaatattgtaaaatcgacaaaggaaattgcgatttagatatacatattgcattgcgaaatgagggggtatcgtgtataatatgcccaaggaaataaggggaaacggggcagaaaccgtcgaaatgcgtcgaagctgcggcctgtttcgtgtggtggcgttgacgatctgtcagagccgcgcgtctgaagttagaggggataagacctgcccttgaccccgcttccgatcggccggccggatgaaatgcgtgattgcggacacgcgtttctgtcccggccggcttttttattgtcttgtaaaaaacgacctgttcgcggggctgggcggctttttgcaggtggaagctcctgtcgtgagagactcgttatcttcttaatggggatccgcgcctcgtgcggaggcggatcctgttcgtcaaggagaacacgatgagagaattatggctggaaatacagaaatttaaaacatgggcaaagcggaaatatcccggtttgccgctgaatgcgtccggtggggaatgggagacggcgtatgagggttgggacacgataaagccctgttcgagaaaacgataaagaacagccgtccaggcgactttgctgatgccgagctgtccgaattggtgtatatcatcgcgcgtaataatgaggatgaggctttggcggaatatctgtcccgctatacggaatggtttatgaagctcggtgaactatcgctgctactcaatgagccggaagccagatggcaattcgcaatccgattaaaggaaatgacagacaaaaagcgggcgggagttttactggagaaattcgtcaacgacgacaacgagtatgttagcagaagggcgcttatggaattgcccgctttactgcctgataaagtggaggcttactccacatggttttggccccgggatgtctatggggactggcaggaataccaacggatggccgtgcttacggcgctgaaggaaatccgatccccgcttcttggggaatatctaaaacgagcaagagaggatggacgaatctatcttgtccggtacgcggacgagatttcttccgaaatacaaaggatgcaggcggaataaagacgctttatcggcatatgctgttcctctcctttgaatatgtacctgtgaatatacctgcccgatggccaatatcgttttcatggaagtgccagacaacgcaaagccgccggaagctgccgccccagggagcaggagcggtcaacgccatagggaaaggagaagggtatccggctgcacaaacgcacgacggtataaaaagcgggaggaacgagccctcccgcttggtttatatctccacaatggtgacgccggtttctccttcgccgaaggtgccgaggcgataggattttaccgacggatgggtgcgcagatgagcgtggacggcggcccgcagcgcacccgtgcccttaccgtggatgatggtgatctggccgagccccgccatgaccgcgccgtcgatgaaacggtccacctcgagcagcgcctcatcggcggtctggccgcgcagatcgagctcagtttgcactgagcgggtggcacggccgctgcccgaggaggtggccgcccgcccttttggcggcgtagggccgcttaccttgcggccctcgatcagccgcagggcggccagcggcacgcgggtgcggatgattccggcctgcacctcgacgttgccggaggaatcgggcggggcgagaaccgtggcttccttatcgagatcggtcaggaggacggtatccccctgccgcagcgggcgaggcggggcgtacggctcctcccggcggcggttgctcaccggatccaccgcgttttccgcggcgttcaggcgggaacgcaggcggcttttagcttcctgggcacgggcggtgaagtcggcggcgttcttttgccggcgcaggtcgtccagctcccggatgagggcttccgcctcgtttctggccctttcgagcaggcgtctggcttcctccctggcctgctgcagttccttttcccgcagccggtcgagctcgtccagatccgattcgacccggattttcgcctgctcggcggccctggtcgcttctctggcggttttcagctcgtcctccaacgcccggcggcggtcttccagctcggtaacgacgtcctccagacggcgatcgtctcccgacaggcggtcccgggcgttttgcaccaccgatgggtccatccccagccgttccgatatggcaaaggcgttcgagcgccccggaacgcccacgagcaggcggtaggtggggcgcagggtcgccacgtcgaactcacagctcccgttttctaccccctcggactggatggcgtaggccttcagctccgcgtaatgggtggtcgcagcgatccgcgcgcccttttcccgcagccgttcgagaatagcgatggccagggccgccccctctaccgggtcggtgcccgcgcccagctcgtcgagtaggacgaggctgcccccgtccgcgtcgtccaggatccggatgatgttggtcatgtgggcggaaaaggtggagagggactgttcaatggactgttcgtccccgatatccgccaataccgccgaaaacaccgacagggagctgccgtcgtccgccggcggcatcagcccgcacatcgccatcagagtgagcaagccgatggttttcagggtgacggttttgccgccggtgttgggcccggtgatgaccagggtgtcgaaggcggcgccgagctccacgtcgatggggaccaccttctgcggatcgatcagcggatggcgggcgtggcggagccggatccgcccgtcgtcggtcaggcggggacagactgccttcattttataggccaggcgggccttggcgaaaatcagattgagctcgacgaggacgccgtagtccgcggaaatcgcgtcggcgaagccgcctacctcggcggacagttccgcgatgatccgctcgatttcggctttttcgcggctttcgaggaccttgagttcattgttcgcttccaccgatcccatcggttcgacgaacaccgtggccccggaggcggaggtgtcgtggaccaggccgggcacttccgcgcggtgctccgccttgaccgggacgacgaaccggccgtcccggatggtcacgatgggatcctgcagcagcttctgataggcgggggaacggaccatgcggtcgagctgttcccggatgcgcagggccgcggcccgcattttgcggcggatatcggcaagggcaggggaggcgctgtccgatacctcctcctccgataccaccacggacccgatcttttcctcgaggtatttgttcggcaccaggacggaaaaccggtcgtccaggctcgtctctatcccctcgcagtggcggcgccagtccgaaaccgagcggatgacccgaagggtttccgcgatatccagcagttcccgcagcgagagggaggcgccggcctccgcccgccgcagggagttgtcgacgtttttcatctggccgaaggacggggcgccgaagcgcgccatgagctgataggcggcatcggtttcgtccatcaggcgttttgcctcaaatagggagacggcaggcgcaaggtccctggccagggcggcggcatcggcacagccggtctcctccgcgaggaggtcgagcaccttgtcgagttcgagcgctttcatatgtcggttcatgggttcctccaatattccgtgcgtttcgcgccgcggcgaaagggatgcaggccgtcggcgccggggttttcaaatgattcgtgatcgtatgcctttagaagccctgggaccccagccccctatcgcgcatatcgtcggccgggacatccgcgtttccgccggctttcctaaagagaggggcggctggcttttggatcaagggaaaattccccctggtctttcccggcttgtgaggccattgcgggacttcacaatagcggagacccgacaggggctttcggcgggtattttggtcataagcccgtgcgtttatagcgatccccaaacccgggaactccgtttagatttagaccggcttatccatccatggtgtgataaaactgcagcgtctgaaagctccggcccagctggcaaagcaggaaggcctccgccgtcttcgccagggaggggacggcttcctccgggatctggaacgcaaagcacttttcaaacggcgcatgtacgatgtgccgcagcgcggccagcagggtgggaggcagaggcagggcatcacctggtttttcacacctggcacagcggagtacaccgtcccggggcaggaaccaaaggggagcgtcggcttcacggcaggaggagcaggacccgaggtcgggcatgtagccggacagggtgagcaggcgcagctccaccaccgctttgatgagccggagatcccgtttgccttcagtcagaaaatgcagggcgttgagcagcagccggaggtgttcctccgccggctcctctcttggggcgagcacccccgccagctcacagaaatactgagccagtgccaagcgggcgatatccccgtggatgtcaaaaaagacgcgcagcggacgcgcgtcctcaattatgtatttgtcccggctccggccctcgcgcagggtgaggcgggagtaggacaggagccgggtggcgacgctgccccggttcttgagggtgcgggcgccccgcgcggaagcgtggaccgcgcccagctcccgggtcagggccgtcacaaaacggtcggattcaccgatattgttgttttcccggatgatcagggcgtcggttgtcagacgcatagggcggttgctcctcccgtggacggggcggggatacggcacccacgccgttttcgtagatatccacgccgcagtatcgcaaataatcctccacgcggccggttttggcaaaggcagaccagtagttgtcccgcttcatccttcgtcctccgttcatgcgattgataatgggatatcgccggatgcgatgtctccattaccatgcgccaaaaacggcggaagatacccggaaaactgtggacggcaggatctgccaattaccggacgctttcgttagagtttgtatccgaagccggtgagcaggccctgccggttccgccagtcttccttgaccttgatccagcactgtaggttgaccttggcgccgaacagctcctccatttccagccgggcggccgaggcgatctccttgagcatcgtaccccgtttgccgatgatcatgcctttgtggctggctttttcgcaaaaaatattcgcctcgatgtcgaggatggggccgcgctccgtttcccgttcgtgcatcgattcgatggtcacggcgatgccgtgggggatctcctcccgcagggagaggagcattttttcccgcaggagttccgccgccaggacctgttcgggctggtcgcttaccgcgtcgtccgggaagaaatgggggctttcaaacgcataagccgacagctcggccacgaggtcgtccacaccctcgccggtcagggcggagaggggcagcacggcggcaaaatccgcctctttgcgccaggcatcgatgcaggcgagcagcacggacttatcttccagggtgtcgatcttgttgatcgccaggatcaccggcagcttttgcgcctgcagctgccgcaggagctgccgttcctcttcccggatgacccggcgtggttcggtcaccagtacgccggcgtcgacgcccgagaccgcctcgccgatggatttgaccatgaaatcccccagacgggtgcggggccggtgggcgcccggggtgtccagaaaaacgagctggagggggtccctggtatacacccccatgatgcgggtgcgggtggtctggggcttgtcggacacgatggcgaccttgcggccgacgatggcgttgagaagggacgatttgcccacattgggccgtcccacaatggcgataaaggcggatgtggtgttcatagcgtactccgtttctgtgtaatgaagggacggtgtcaagaggggcgccggcctttcccggcaaggtaaagcggctcggcatagcaggccagcgccagggtaatatagggggaaaccgtgatgtggaacaggccggtgagaagcgaggccgctgtctgtgcgacggccccccacggagcctggaacccggcggcaatcaggccggaaggaaacacgaacaggacgaatggaatcagatagggcagatacagcggcagggcgaagccggcgagtgccaggcggttccccttcatccgccgatgggattcccccggcagggaaggccaggccgaaaccccaacggcggcgagataggggcagaggaaaaaggtcaggagaaaccagagacaaccgccggcggcagccagcatcaacagggatagaaggccggcgggacccggatccatggcggacatccctccgtcgaggacgccgacggccaaggacaggatctgcggcggaagctggagaaaaaggcccagaagcagcgccggagggaaacatcccgcccggcaggcataaaaggggtcttgcacagcgggatcctcttctttaagcgtgcgcacggcagtgcggacaaagccgaggatcaggggataaaacagcacagccgcacccgtggacagcagtgcggccgccaaagagggacacaggccggatcccgtgagaaaagccgccagggtattcaccaggcaaaggggaccggcggcaatgaatgaggcccgccagagcgcccgccggtgaaggcggtataccccgcgggcaaagacgcggataggatgtttcatacatacctcgtgttttttaaggcaaccagcggaagccgcggaggccttcagagcttgtccctggcgccgccgcggaggataaaccacagcaccagggggacggagaggaccagcagcgcgattttatagggctgcgcgagaaagtccgcgaggatctgccgccagatatcgggacgggcgaaaagcaggattcccaccagggctgccgccagggcgcaaagcaggacggcccccgccgcggcatcctttgcggcccgtgcccgcggctgccgttccgtggaggcgagatccaccgtgcgttccacggcggtgttgaccgcctcggcgcacaggacgagcgccatcagaaccgccagcaccgcccattccgcccggctgagggaaaaatagggcgcaaacgccagcacataggccgcgattcccaaatggatgcggaaattccgttcatgccgtatgcagtaccagacgcctctcgcggcgtatccgaaactcttgataaaccccattaccggttcctttgcatcgttttatgtggaatggacacggaagtatgttcagcggtcgtcggtcatgacgtagctttcgccccgcgggagcccgaccgaggtcatgacggcttcttccttctcccgcatccggacggcctccagccccccgtccacatggtcgtaaccgagcaggtgcagcatggaatgtacggtcagataccccatctcccgctggagggagtggccgtactgctcggcctgcaccatcgcccgttcgatggagatgacgatgtcgccgagctgtttggcgccggtttggggatggatatcgtaatgtccgttttccccgagcgggaaagaaagcacgtcggtcacggcgtcgatcttgcgatgttcccggttgatttcctggatttccgcattgtccacgatggagatatccacctcggcggagccctcgaaatgttccagctccagcacggcgtggcagcagcggcgcatgagcagacggatgccggtggggattttgacggccttctgtttgttttcaatgacgaccttgatcttttccatagctcttgacccgtttcccttcattcgatttttcataccgttcataggcctggatgatacgctggacgagctgatgacggacgacgtctttctcattaaagctgcagatggcgatgtcctccacgccgcggaggacccggagcacctcccgcaggccgcttttgcgcccgtcgggcaggtcgatctgggtgatgtccccggtgacgaccatcttggagttgaaccccagccgggtcaggaacatcttcatctgttcgggggtggtgttctgcgcctcgtccaggatgacgaagctgtcgtccagggtgcggccccgcatgtaggccagcggcgcgatctcgatgttgccccgctcgaggtatttctgataggtttcggtcccgagcatatcgaacagagcatcatacaggggacggagataggggtccaccttgctctgcagatcgccgggcaggaagccgagcttttcgcccgcctccacggccgggcgggtgaggatgatgcggttgacctgcttggagcggaatgcctcgaccgccatggccacggcgagataggtcttgccggtgcccgccgggccgacgcccagcacgatggtgttctttttgatggcctccacgtatgtcttctgcccgatggtcttgggtttgaccgggcggcccttggaggtgatgcagatgctgtccgaggtgagctgcgggatctctgcctcgcccccctcgtccaccagcatcaggacataccggacattctgctcgccgagctgttctccccggttgatgagctggagcagcccgccgatggcgcgtaccgccttggcgaccgcttcgggctcgccggtgaccttcaggtcgctgtcccggctgaggatgctgacggcatagtgctgttcgatcaggcggatattttcatcgaagctgccgaagagggagaccgcctgttccatccggtcgacgctgatggtttgttcaaacatcccaaaacctcgctttatctgtgttgaataggggccggtctgtttggattttcccgcgcaggttccggattatacgttttattctaatattaataaagaattgtctacattatagcaatactttatccgcttgtcattagataaaccccacaaaatttgccagccatcccccacgagcggcgcatgacgacgcgcgaaaaagggtcttcgctgccacatatcgaaaaaaatcgcatcaacgtccagttttatacggatttccacttttaagcaaaatcgcgttcgttatgcgtggacaacccgccatacccgtttttttcaggtttggcctgagggccaccttctttcttcacacgaagaaagaaggcaaagacgtgcca

SEQ ID NO: 4506 - DNA, 11750 bp, Unknown
  16S sequences of unknown bacteria
ggccattgatcatttcgacatccaacagggagtgcggttttcgacctacgccgttccaatggttatcggcgagattcggcgtcatctgcgggatttttctccggtgcgggtcagccgttccttgaaggatattgcttataaggctatgcaggccaaggagcggttgacggcttctcttggccatgagcctacggtagtggaaatcgccggggaaatcgggctgcccaaggaaaacgtggttctggccttggaagccattgtggacccggtgtccctttacgaaccggtattttccgacggcggggataccatctacgtcatggatcaggtttccgatcactctgatgacggaaattgggtggacgaaattgccatccgggaggcgctttccaagttaagcgatcgggaaaagaaaatcatcgcgctgcggtttttcagaggaaagacccaggtagaggtttcagcggagattggcatttcccaggcgcaggtctcccggctggaaaaaggggccttggccaaggtcaagggtgagatatgactccggcgtgaaaacgttttcggacgcaggaactgaaaaaatcgacatagaaaagggccgcccaaggggcggtcctttgttatgggagaatcagcggatcatcagcacatagggatcaaacagttgctcgtgcagctcgtccattgcggcgtcgggcgcagcggcatcggaaagccagagcgagtagtcgtactggcaaaagccggacaggtccattttgaaattcgtctcccagttgttgttcatgacccaggaatacagcgggcggcaattgttttccggtgcaccgtcgcacaggcgtatgggatggtgctgcatactgcccatatagaccagaggcacatcgcgggcggcaatcagcacgctgccttggggggctacccgggcggcgccgtcatctgccatgtaaaactccatgcagctgccgggcagttggtcgataccggggcggaaagcttcgcggccgcctttgcgcagtacggtttcgctgccgggacggtttaggtccagggagaggaaaacgctttctacctcatcggagatcgttttgcccagttccagcgtaaaatctatgcgggggatcgccttatacagcttcaataatacgtccgccttgactgtgccggggagctggtagcacagtcggagctgggtaaagatgggcccctgctctaggcactttacttccagaagccggccgatgtgggtttcggcgtgctggccgcggatgttgcgtcccagcacacggcgctcctcataagaggcaaaaggcgcctcggcgtgggagaacgtgcgctggtatatgggggtgaaaaagggaatcgacgttcctgccatttccgttccggtgcgcttgtccacaaaggaggtgacgccttctccggggcggtaacacagccggaagaacggggtctccacccgataaggcaggaagcaggtggcggggtcgtagtcgttgataatgtcccgtactccctccgcgcctacataacatttacggctgttcagcttgcccggggctttgtgacgggcagtataggtgtattccttctcctcgccataggccagggtgtcgatgaagctgatttttttgccgcggggatggggcgagatttggcagaggtattctttgcctgctgcatcgcgaagcacaacgtcttccagcacaagagtttcgatgtaaaattctaccagctggggctgcttggtatggctgacgcctacgacacggatggcaccggtggtattgtaatagcgcagcaggtcgcccttttgctccgcaatccggcagagcatcagcgacgtagcttcgtgagccttggaggcataactgtttttgcgcatgtccaaaagcagcaccattgtgtcataggggtttgtaatggtggaggagtgtccccaggtgtgttcggcgtagaggagcaggttgtcctgagcggctgcggacagggcagggtagtgggtttcgatttcgggatccagccgttttgccagctgatagcgatgaacggcatccttgtaatgcttcacagcatagggcgtgctgcctacgccgttggcccaccagtccgtccagtcgccgcggtagaccggcgcattcgtcagcttcggcgcaatggcggtatacagttcctgcagggagaccatctccacccggacctcatcgccgtatttggcgttgtatgcgcggagagtctcgataatttccacagacggaggcgcattgtcgctgaacacgccggatactgccgttacgataaaatcataggggtaaccctgggattcgcactcgtttaggtagttgttcagattggcgtgcagctgctcggccggggcggaggaggcatcggcatcctcacccaggcggtcccgcagcatccagttgactgcgcggttgggctggatgcccagtacgttgcccagattgtagtgctcgccgttccagaccagcagccgctgacctgcggagttttcccagaaaaaagcgttttgattctggtacaggggatacatgccgtggtggcagtgaacattggcaaaaagaaactccacgccattggccagcatggcgtcgcgatagcccatggagaagccgtttacatcggcggccatggcggtgcgcatgggaagttttttctgccactccgccaggcgctggccgtagatctcggtgtcaaccagatcagtgaagttcagatagttggccgaaatgccgattttcccctccgctacaaggcgggcaaacgcagtgcggttgtcctcgttggcctgccgccagaattcctccacgcaataaagcgtttcgcagttccagcggaagtcggcgtattcggggttgcgcatcatggccagaacggtcttgatatagttgacctggatggcgatgacccgctcctgtaaatcggtgtagccgatgtcggtgtgggagtggtggatgacatagacggttttgatggaatgtgccatggttatcctccttttcagttgcggacgcaggccaaaatgattttgatttccaggccgttcgggctgacaatctcatagtcgcctgcggcttggggtacgatgcaggtttcggcgtagtgcagctccaacggggcaaagctgccggttttgctgcacagcagggcacaggatccgtccaccagattcagcatatgcacgcttccgttgcgttgtacgggcagggtggtggacgtggtaaggcggaaggtgtccagaaactcccgttcatgcaagccggtgcgcacaaccgtgccgtttgcgccggtgtagacctcgcggagctggtttatcaggtttttttgcacccactcggtgttgcggttccactggatattggcagcgccatgctgcaggtggatcggacggggcttgccatccaaatcaacacgtccccagtcccagagcttgaaggtgaagatatagggtgtggcgctgatttccagcaccatggtgtctgcgccggagcagtgcaccgtaccgcccggtatcagcacgtgatcgtgtttttttaccgggatgcggttgacgaatttttccgcagggaaggcttcgtcgccgttttgagcggcttgcagggcggccagcatttcttccggcttggcgccggtcttgatgcccagatatacgcaagggttatccccggcggcatccagaaaatagtagctctcgtcctgggtgtagtgcatatggaagcggctttggatgtactcggtcaaggggtgcacctgcagggaaagattttgcccatgcatcgtatccagcatatcgaaccgaatgggaaactccttgccaaaccgtgcgtggacgcggtcgcccagcagctcctgcgggtgggcgaagacgagattcagggcgggcgtttccaccacacagccgccgaagtccagcagcaggctattttcctccggaacaccatcgaagctccatgcgtaattgctgtcgttttcgggcaggtcaaagtgggtcttcatccagtttccgccccagacgcccgggtcaaaatagggcaccatgcggaaggggcgggcagcggcattggccagtgcggcacgataatcctcccccggaacgatggcgggttccttttgggtggaggtgtccaggtagtagtcaaattccttcaaaagggagtcctttatctggtcgccccagcgccactcggcaaaatagccccgcttatatttggcacgcagcggcaggccgtgcttggccgtgtgccagttgtcctgccctctgcggaagcgcagctggacctcccatcgggtcagatcagcataaagcagcacatcgccccgggtgataagggatgcgccgacaccatagaccaacacaaagccgcttttcacggaggcaatctttttcctggcagcgcgcagagcatcggcggggtagaaatcctgcaaccgccaggtcgtcatgatgccaaagacagggtcgttggtgagctcgtgctcaattctggcatccagctcggcaggggggatggccagctcgtctgcgtggaggacgagagcggcgcgcgggaaaagagcaagcacttctgcctgatccacgccggggtaacactccacggttaccacaagacgatcttcgccgcagagggtgtgcagttcctgctttacagcgtcggttccgcgcacggcccgggcggtgggtgcggcctgtatcgtgggaaagcggcggtaggggtaggaatttgacggcatagggggcacctgctttctagatttctctgtattttaaaatacacgaggcaaaatgatttgtcaatacatttttagaaaaaaaaaaattagtaattacatatttatatatttacaaaagccaaactgcgtgctatactactgatagaaaaaacgtgaggggggtacttctttcatggcacagccgttgtatttgcaaatcgcccagcagttgcgggagcatattttaaatgaaaaatacccgcttaacgcccgtattcccacagagaaggagctggctgttgcgatgggggtcagccgtcccacggtacggcaggcgctgaatctgctggagcaagagggtcgtctgacccgtgtgaagggcagcggcacctttgtgactgaacccaagatcctgcacgaatccacccactttgtcatcggataccgggaggaaagccggaagcataactgccggctgcgcaccaaagtgctgcttctgcagaaagaaaagctcggtaagccggcggcgaaggctcttggcttgacagagggggagcgggtgacccgaatgacccgtctgcgctggctggagggccaatataacgataaacccatcatgtacaccacggtttatgtgccggtgcggctttttccggaaatggcggagctggactttaccgacgtatctttttatgaaatgctggacagccgcggtttgacggtcatgcgtacgtctcagcggttggatgtgcggatgccccccgccgatgtcgcggccgggctggaaatgtcctccttcgaaccggcggtctatattacatccacgggatacactctgaacggtgtggcggtggagtacagtgagagctactacccggccagccgcagcagctttaagattgagattaaccgttgaaggaggttggcgatgcaggaggtttatctgtgtctggatgtgggcggaactgagattaaggcggcgccgctggacacgcaggggaatcttctggcggagattcgccattttcccgctatggctggaggcgataaagaaacgcttcttgaaaactttgcccatatttttcgggagatttgcccggcaggagcaacgccagtggaaatcgacttggcctttcccggccccttcgattatgaaaacggcgtttgccgattgaagggcctggataagtacgatgctctttacggctgcgacttgcgccgggcgttttctgcaatcagcggtctgccgggacagcgcatacggtttctcaatgacgccgcagcctttgcgctgggggaaatggctttcggcagcgcagtgcaggcacacaaagcgttgtttgcggcaattggcacaggctgcggcagcgctttcggtatgaatgggcgtttggccgctgaggggacgcccggtgtgccgcctcacggctatttttacgatgcgccgtttctggatggttgtgtgggcgattacatctctcgccgcgggctggaaaaactgacggcggagttgatgggtacgccgctggatggccgtgcattggctgcccgtgccgatgcgggggacacgaaagccgccgtctgctttctgcggtttggggagcgccttcgggatgctctgcgtccgcagatagaggcattcaaaccggacgtgctctgtctgggagggcagatcatgggcagcgcaccgctgttcctgcccccggtggaagccctttgccgggaaaaggagatccggctggctgttacgcaggatacctctttgcgcacgatgcagggcttgactcgcactgacgcgccatcctgtgaatgattccctttgaaatcccttggagagaaagaaatttgatttatgtgcgcaaccgtcattgtgaccgacggcgttaaatcagcaaaaagcagtctgtcaatcctgccggttcgtttgcagtcatgcggatataccgtgcagccgtgcctggggtgcagtggaggcaactgctgagaggtacattatgaattggtttcatcagctgttttttcctgcgcacgaccccacagaatcggagctgaccgccggccgccgctgtatcattgtggaaagcgcagtggcaagtatcatctttgcgttggtttccagcaattttttggccgggtacttgagctatcttggcgcgtcggtgtcgttctgcgcaaaagtcgccatgattccgtctctgggctgtgtgctgcaatttttctccccctttatatttgagcgaatgcaccatcgcaagctggcaatctggctgatgtgccttttgtttcgcatttccgtcagctccatctttttgatgccgctgactgtgccgaatatggatcgagcccgcatagtcgtgctgatcctctacactgtcggttttttctcggcggggcttgtcacgccgggactggagcatatgatacaggggctttcgcctcagggcgggcgcggacagtattacgccgttaaaagtatcatctgtacctgcatttccagtgcggcaacgctgatgctgggccgtattttggacaaatatctggcagaggatgcgggctacaccggctttttcatcatcggtattgtcagtttggccctgacggcgatggacgcagtgctgctggctgctgtgcgggaaaacccggtcaaattcacctccaaaatgcatttttccgatattctgcgtccgataaaagaccccaattaccgtcctttgcttttatactgcgttatcggcgggctgaccggcggctttgcatcgccgtttctctcggtgtacgagctgcgggtgctggggctgagccacaccttcatcacctcagtgggaatcgtctctgcagtggtaggcatggcgggcagctgggtctgggggcggatggctgaccgtacagcgtggaaccgcgtgatttggctgacggcctttttgaatctcagctgcacgctgggttgggcgctggtgcgccctggttttgcgtcgttggtcgcgccggtgcttatcgtagtgacggcggcttgcacaggcggggcgtctctggctagtatcaacctgcaattttccctggcgccggaaaacggaaaaaccgcctattatggcgtgaccacagcaatgtccagtattgccagctgcacctccgctgccatcggtacggcggtacagccgcttttggaaaaaagcatgggagacaattccatctcggtactgttccttatcgctgcggtgggcggatttgtaaaccttctcatcaacgggcgtaagctgccctctatcacctgaaaatgcagcatatcaacccatgacacattttttcagaaggagcgtttttatgtttccgtatcaaaaccctgaacttccggtagaggaacgaattgacgacctgctggcgcggatgaccatcgaggaaaagattttgcagaccgaccagtacggctccagcgattttacgacccaagacgaaaacggcagggtcaccgcgctggatatggggcgcttcgacgagattatgcagcacaacagcgtcgggagcgtgcagctccgcggcacgaccgccgctcaggcgaatattgtgcagcgctatgcgatggaaaacacccggttgggcattccctatctgttcagtgaagaagcgctgcacggcttttgttccagcaaagccaccagtttccctcagcagatcggtcttgcggcaaccttcgatccctctcttggccgtgaaatgggccacgccattgcgtcggaggcacgcgcctgcggcgtccatgagacttacagcccggtcatggaccttattcgtgacccgcggtacggccgcggggaagaatcctacggtgaggatacccatctgtgcgcggagtttgcccgggaaacggttctgggattgcagggcagcagtctggctgatccggacgccgttgcctctgagccgaagcactatgtgggatacggcaatccggtgggcggactgaactgcgcccccagcaccatggggcggcatgatgtgttcagcgactgcctgccggtgtttgaggcggcttttgtggacggaaaggcgtccgacgccatgtgcagctataactccatcgacagcatcccggtttcgatggaccacgaaattttgaccgacgtgctgcgcggtcaatacggtatgcccggctttgtgcgcagtgacttgacagcggtttcccgcctgtacgactggcactttattgccgaaaccccagaggaagccattcggatggggatggaagcgggcgttgacctgcaattatatgattttcctcacgaggtgtggcagggctccatcgcaaatcttgtgaagagcggcaaaatgagcatgtccgtgctggatacggcttgccgccgagttttgcgcatgaaattcctgctgggcctgtttgagcacccctataccgacgaaactcgcgctgaatcgctgctgcgctgcccggagcatctggcaatcgcgaaaaaaatcgcgcagaaatccatcgttctgctgaaaaatgacggtctgctgccgctgaaaaaggatttgcgccgggtggcggttatcggtcctgcggcggcaaccgtttcctatggcgattataccgagagccgcggccgcaagggcgcgatttcggtgctggacggcgtgcgtgccacggtctccccggaaaccgaggtcctttatgcccggggctgcaacttcttgggacaggctctgcacccctttgatcccggtatgctgcgggatgaggacggcggctatggcctgaccggccgctactacaacggcccggagccggtgggagagccggtgcaggtgcgcagcgatcgcaccatcaacttcaactggattttctctttgccgcactctgatctggacgccaactgcttcagcgttgcctggaccggctcggttgtcatgccgcataccatggacggatgcatcggtttgagcacgcaggacagtatgcggctgtatgtggacgatgtgctgcttatcgacggctggggaaaagacaagagcgcggatcaggcgctggacttccactttgaagccggccgtgcgtataagatccgcattgagtttgtcaacgatggccgcggcgcgcgggtcatcttcggctacagcgccgggcgggaggatttcagcgttgccgtagaggctgcccggaaggctgacgtcgcgattctctgcatgggcgacaacgaggaaaccagcggcgagaacttcgaccgtaccgacctgaatcttcccggccggcagctggaactggtgcaggccgtttatgccaccggcacgcctgttgtactgctgctgcagagcggacgccccgtcaccgccaactgggaaagcgaccacctgcccgccattttggaggcgtggttccccggtgagcagggcggcatggcgattgcccagactatttttggagatgaggctcccggcgggcggcttcccattaccttcccgcggagcgtgggacagattccctgtcactacagccgcagaccggggggcggcaaaaggtatgtggagatggactggctgccgctgtatccctttggtttcggcctgacctacacgagattcgcgttccgagatatgagcctcagccgcagcgtcatcggccccgaggacacggttacagtcagcgttacagtggagaacattggcagctgcaccggcgatgccgtgccccaactttatgtccgggatatgttcagttcagtcgttaagccagagcgtcagctggcagctttccagcgcgtgacccttgctcccggcgagagccgccgcgtagagctgactgtcggtccgcggcagctgcgcacgcttggcgcagactatatctggcgggttgagcccggcaagtttgaattgcagatcggcgataatgcggagaatattctgctgcgtgccgatttgacggtgaagtaaaggaattcggcggacgattttcaccaaacagagaagaaaagcacctcctgctgtaggataaaactatagcaggaggtgcttttatcatcagtcggggcttgcttcgtgttctagggcgatgcgcagccgggaaagctggacataaccggtttcgtcggcaatattttcggaaaggagggtcatggtctccacaagttctgaaatatgggcttttcctcggtcgggaaagagcagcaggttcccgtaaatcgcgctgcagagggtgccgttgagggatttttcggtattctccgttaggagccggcaagctgactggaaggaatggaaggcggccaccccgccccagtaatcgctgtcctcgccggtttcctgaaacccggaaaatcgtgtataggcttcgatggcgctggcttgggccaagcttttcaggtcagagcggtcgtggagcgcgtactgccatagaaccagaaagaccgccgctgccaggaacggcagaatcagcagaagaaaacgctttttcatagctgcacctccgttgagatgctcttattctatcagaaaatcggggaaaagtccaccatgaaaattcggacgggcagttctaccggctgtcccggctgcataggatgggagtatcagacaagcaaaggacgggaaacgtatggacggatacgaagcggttgctgcctgtatgaatccggggctgcgcgagacgctgaggcggattccgccggagatacgccgggggatccgagaaattcggctccggcaggggcagccggtggccctgacgacggcggagggaatccgttttctgctcccggaggggcgactgacggaatttgacacgcctagggctctgcgggttttgccggaggaaatcgacgaaatttttcgccgggcctgcggttactcggtacacagctgggaggaagaggctgtccagggttttttgacgctggaagggggccaccgggtaggcgtcgccggaacagcttctttagaaaagggtcgggtccgagctttgcggcaggtgggaagtttaaactttcgcattgcccggagcattcccggagccgccggggacttgccctccc

SEQ ID NO: 4507 - DNA, 25487 bp, Unknown
  16S sequences of unknown bacteria
tgctcgcccacatagaagctgcgctgcatcatgcccgcgtagcgctcctgccgcagcatacggccatgcttttcgttgtccttctcgatcgacttctgcgccgaaatggtcaggtacccatccttcagctccagcgtgatttcatccttcttgaagcccggcaggtcgatatccacttcgtacccgttttcgacttccttcacgtccgtcttcatcatatgccgcgcgtgcttgccatacagctcgcgatccacattgccccagccgcggaagaagttgcgatcaaaatcatcaaaaacatccatcaaattttcaccgaaaaccgtgggaagatacgtactcatactgcaaacctccattcgtgtgcccccgcaccgctggcgttcgccaggtatgcaggttcgcatccggctcttttgggagccatttccttgcggtctttcaccgcctcgctcatctcttcgcgatgattttattatactcaaaagtcaaagaaagtcaataggtttggagaaattttatttgttaattttatatgaaatccaaaagtgttctttcatttcacgcttgccggaaaaggagtagaaaaattaacgcatcaaatgatttagattcattgacttgaattcattgaatgtgatataatgagcttgccaacgaagaaatggggaggcgatgggatggcggaaaagatgacgaaccggcagcgggccgcgctggaaacgaagcggaggcttctggacgcggccaaggcaatcgtgtgcgaaaagggcctggcaaacacttccatcgaggagatcacaaaggcctgcggggtttccaacggcacgttttacacgtatttcaagcgcaaagaggacgtgctttttgcgctgagcgctgagctgtaccgggaaatttacgaacaggcccaggcatatgaggggacattcatggagcgactttgtttttacatggtgaactttgccgcttgcatcgaaaagagcagcctgaagctgtgccaggagtgggtgcgcaacaccgtcgatcccgagctcgcggggatccccgcagaggaaagcaagctgcgcatggatctacgttccatgcgggggctattggaggacggccttgcgcggggcgaattgaggccggggacgcccgtggaggcactggcaggcgcgctggtcgatttgctgtatgggcaaatgctctgctgggatatgtccggcggcgcgtatggcctggaagcgcgcacacgggaattttgcgaccggtttttgcaatcgctcataaacccctatctaaaagaaaaggatgcgtgattggatatgaagatggaaaccgtgaaattgaatgacggcgtggagatccccgtttatggctttggcacctatcagatcccagcggacggcagcacgtaccgcgcggtgcgggaggcgctggatttcggtattcgccatatcgataccgccgccgcttatttcaacgagcaagaagtgggacaggccatccgcgagagcggcgttccccgggaagaaattttcctcacgagcaagctttggttgcaggactatggttatgagcctgccaagaagggaattgcggcttccctgcgcaagctgggactagactatatggatttgtatttgattcaccagccctatggcgacgtgcccggtgcctggaaggccatggaggaagcgaaagccgcgggcaagattcgttccattggcgtgagcaacatgaccccgaagatctggaaccagttcgtgccgcagtttgcgaccctgccctccgtcaaccaggtggagttcaatccttactatcagcagaaagaaatccgcaagatcatggcggcggcaggcgttcaattggaaggttggggccctctggggcagggcaacaaggcgatgctggcagatcccgtcatacaggagatcgccggggcgcacggcaaggatgccggccaagtggttctgcgttttgagatccaggagggcgcgatcgtctttcctaaatccacgaatccgcagcgcatccagagcaatatggatatctttgatttcgcgctaaccgcacaagagatggacgctctgcgtgcgctggatcggggcaagggcatccacgaccctgacgcgccgggagtggcggaatttttggccagcgccttcgacatccacgcgaacgattgacggcagaggaggaatatcgcaatgaaaaaactgggctttggactcatgcgcctacctgtcaggagcgaaaacccgacggacatcgaccaggaaacgttcaatcggatggtggatcgcttcctggaacaggggttcacctattttgacacatcctacgtctaccacaacggcgcgtcggaaaccgccattcgcgaggcgctggtcaagcgccacgagcgcggcagctttgtactcgcatccaaattccccaccttcatgatgccggacgaagcgcaggcggagggtatcttccacgagcaactagaaaagtgcggcgtggaattcttcgactattacctgctgcacaacgtcaaccgctatctctacgccacggaaatccagaatgcgcgcctgtttgagcacatgaaggcgtggaaggaacagggcaagattcgccacatcgccttctcctatcacgatgatgcggcgcacctggatcagatcctcaccgagcatccagaagtggaggccgtgcagatcgccctgaactattacgattgggaagaacccttcatccaggccagaaaatgctacgaagtgatccgcaagcacggcgcgcaggtgattgtcatggagccggtcaagggcggcatgctggcgcgcgttccggaggatgtcgcggcgcggatgcggcagtggaatgcggcaacctcgcccgccagctacgcgatccgctttgccgcttcgctggagggcgtgctggtggtgctctccggcatgagtacgttggaacaggtggaggacaacacttcctatatgcgggatatgaagccgctggccgagggcgaacgcgcgctcctgcaagacgcgaaagaagccttctgcaaaacgtggaagtacaattacgaggattttgctgcactggatgaaaacgcctatggcgtgcccatctctggcatcctccgcgcctacaacagcctcctcatccagcccaatcccaccttcggggccgagctgaactattataagagcttccgcagcgcctatgaccgcgcttttgaagcgggtgattacgcgaaacagaccgaagccatcggcggcgcgttcgacgtaaacgcggcgctgcgcgaggccatcgcgttcgagacggaaaacagctttcagacatatatggactaaatcggaaacgggggattgcgcggctgcaaaccatcgttggcaaaccggcagacggctggttcgccaacgatttgcgtttcggcaaattgtatatcgccgcttaggcgaagaagaagcctgccgtcatatccagataattctggccgctatactgcggatactgcttgcccacttccgccttaaactcgtcggcgtttttgcagcctgccgcaatccttttcagattttccagataatcgatctttgtctgggcatctttcagatcctccggcgtgtagtgcgaggtgaggatcagagcatacccctttgcaatgtagctgcgaagctctgcgatcatggcgtcggcatgccccgcgcccgccacgatggagtggcagtcgtgccccagcatatgcgtgtaaaccgcgttgatttccggaatctctacatcaaacgcatctgctgtctgcttgatgagaaattccatgccgccgatggttaccttgccggattccaccacattggtgattttgtggatggaggaatcaaaggcgttgccgaacgcgctggcaaaattgtcgatcagggccttgccgccgccgctttgggaataggctatggcgttttgcgtcgcgtacttcgcaacgccgggcaagaacgtgccgcccgcgccgtggtacgcaatcagcataccggccactggcatatcttttagatattccgtcagctcttcattgttatcaaagaaacaaggggattcaatgagcacggcctcgccgttcttttctatgatgaatacttcatcgtcgatacaatcgttggtcttataggcgtgcagccggatgccgccaaaatcgtagacgttcatttcgccttttgcgagttttacggtgtgaaacgcgtttttgtgcattgcgatatcctcctttgggatggccttttgggtttgctctgttttctgccggcggtattagaatagcactgcttcgccgctttgaaaagtacgcacttttttgtgctatagttaccagcgggaaacctttgcacagttaccgaagggaaactttttggtgcggaaaggggtttgcgggatatcgggtatattgttaaaagttgatgaaacaattgacgacgcgacgagttgccgctacaatgcaagggaaatccggtatccaatggataccaagtttctatttcgcaccaagggaggaagtcttgtggcgcaaaaagaattgcccctttgcccggtggagaccacgctgatgctcatttccgatcgctgggtcgtgctcattttgcgggatttgctcacggggaccaagcgctttggcgagctgaaaaagtcgctggcgggcatttcgcagaaggtattgacgaaaaagctgcgggatatggagagcaatggcctgctgacgcggcaggtgtatcccgaagttccgccccgcgtggaatacacgctgacggatatcggggaaagcctcaaacccattttgggggcgatgtttgactggggaatggactacaaggagaagaaccactcgccttccaacgcggcggtagcggcgctcggcgcggctttgcattgagcgcggggaaagcgaaacctctatgccgggcagcgcgcttcggcacggctttaggctggcaaaattttgccagcctaaaatcgtctaaagccgcaatagccgcgccggcggctttaggtcgagcgggtcttccgcggcgtaggcgtgcacgacggcgcttttgcgcgcgcggatgcagcgggtcatcagcgcatagcgggtttcatcgtagatgtgatcctcctgcgcggtatccacgtcttccacactgcgctcggaatacaccagcgcgggcacggtgcgaatgaaatggcggcaggtgttaaacacgtgcagcatgggccggccctcttcgtcgaaggccaggcgatagtgcaattgcaatttgccggggatgcgcgcgttatcgcctttgtcaaaatacacgccctcgcgcgccatggtatccgcgatgctttcgccgcggctggcgtcgaagatggatgggtcggcaatgccggtgatggtatgccctttcaggcagggatgttcgcgctccatgcggcggatttcgcgggccacttcggcggcgttgtgtttcacgccttcgttggggcggtcggtcacgccgtagtattcggccacgcgccaggcgcggccgtcttcgtcgaacgcccaccagcccacggaaaagggccgggcatagccccaatcgaatccgcgcacgatgggccagtatttgggcacggcgaagggcgccaccacgtgcgtgaagcgctggtcctcataatgcgcgggatcgttgcgccattcgcggaacacctggccggaaaacgaatcccacgagccgtagagttgcgcgtcgcgctcggcgctgggcagcatggccaggttggccaggtaagcggggtcgttttgcagcagggtggggttgtcgtgtacggtggcgggcacgaaaatgcgcgtgcgcgcgatggtgcgcacgctgccatcgggcatgtggatgcgcgcgtcttcggagatgggcgtcatgggcggcgcggcggtgatgaagcgatccttcacccagccgtgcccgatgccgccggggttggtcgtggcgcgcatgcacacaaaggtgcccgggccgctgggccggttgcgcgagaacataaaggaatattcctcccaggtgaagtgcgtcagctcgtcgaacacgatcacgtcgaactgccggccgcggtatttttcccggtcgtcgctggtgtgcatgctgccgaaggcgatggtcgcgccggaagggaatgtccagcggtgttcctgcgcgttgtacttggcggcggggaaggcctgggcgtagcaagcgcggctgcggtcgatgagctcgctcagctcgggataggtcttgcgcaaaatcagcgctttgaagtggccgatgtgcacccaatataggggcagcatcaacgcggcgtcgctcttgccgccgcccgccgcgccgccatagagcgcctcgtattcccggcgcttgaggaaggcggcctgccggggatgcggccgccagaccacgttttttacgatcttcgccatgggagcaactccgttccgctttgcacgccccgcgcgagggattccagcgtgcagccgccgcgtccgcgcaggcgcacgcgcatgaaggccgcgcgcgtttgcggcaggttggccaccaccacgcgcgccccgcgggaaaccgtgaccgtgcgccagggcccgctgtcctcgtagcgcacggcgatttcgatgtgcgcgccgcgcgcgagttccacctgcgccacaaggcgcgaaacgtatttgtgcccgggcggatgaaggggcatgcggcccgtcacgcattcccactcgaagatttccgttccgctattcgcctggtagagcgcgtcggcggtgaagatatacaggacattgcccgcgttggcgaagctatgggcgcgcaagccgtcctcccggtgccatagcccgctggccacgtcgtataccagcaggtgcgcgccgccgtcctcgtcctggcaggagaggagatagcgcccgtccgccgcgcccgccacgccgttttttagccgccagccatccagcttgtaggaaactttttccgccaacgcgccgtcgtaggcgcacacgcccgagggcgaaaggtagaacagcgtgccatccaccaggcacagcgatttttcgctgccgcgcatcacgccgctggtgggcgtgaaggtgatctgatagttggcgggcttggtgcccagtaccttggtcacgccgccctcctggaagaacacgacggtgtcgttcaccgcggccgcgcccgtgaaatcccccgccgtgccaacggtggccgcgtaggaatccgaggcgatgccggcgtacacgtggaaattggcgggatcgcccagcttgctggcgtagatttcgtggttctcgctggaacagccccacaggcggttctggtgtacggcgaggaaatccatatccgggcaggtgcgcgcgacggtgagcgagccggtttgcgaaagcggctcctccagcacgccgggcacgatgaggaaatcttcctccaccgcgtataggacgtacgagccgttcagggcctcattggataggccggcgatttccacgccgtcccaggcggaaaagccgctgccaatgccgctggcggcgattttcaggaaagtggccgtgtcgctggcttcgcccgccaagttgctttgcgaaaccgaaacgctgcccgatgccgcgtaagtatgctccagcgcgcgcacttcgccgctttccaggttcacggaaattttatccggccaaacgagcagcagcgcgcccatgcgcgcgaactgtttttcgcccgccgccacggtggcgatttgcacgccgtttttgtaaaggattgtgccgtctgcccagatcaggtcgtcgcccgcgccggtagcgccgccgggactttgcaacgcgcgttccaggttgcgcggcgcgcgcgtttgcaaaaagggataggcgcgcgccgaaaggttggtcatttgcgaaaattcgccctcgcccgcgctgggcagggtattcagcccgccaaaggccgtcagcatgccgctggttttgcttgcggcgcggatgtagggcaggttcatgtccattccctcctgtccacaaacgcgccccggggccggtgcgcgcggttgtacgcggcggaaaacgcgtcgtattgcgcgttgaacagcgccgcggattcgttgtagcgcgcggtttcaccgttcatcaggtcgatgcgcgccagcagatagaacagatacaaggattcgtgcgggctggacgcgaggagcgcgtcctcgccctcctgcgcgcgcccagcgaggaacgcctccgcgccttcgtgcgtgcggacgatttcctcgcaaatgcgcgcctccagttcccgcaaccaggcttctttttccccgtaggcaaatgtattgggccgcatgcggtcgcacgcggcgatggcggcggatatggtcatacaattttccctccttcattgccagaaaaggggccgcccgtgttgcggcagccccctctggcgcgttgtgtggtatcggatcgcgcaacaacctcttagccaatggaggaatgacgcgaaaacgctggactatggattgtttgcccgcccgtccacaaaggcgttgcctattccatggcggccgcgcgctcttcaaattccccggccatgcgggtcatcatgagggcggtggcggcgtcttgcgcctgggattcttccagcatgcgcgccacggcatagggcacgctcacttccacgccgcgcggaatcagcgcggtgtattcgtttagtcccacgaatacgggggcgttgtagcgcccgttgtccttaaagagtttgatgcgaacggtctttttcatgggtagaatgcgcctccttatcgcaaatcgatatcgcttagttgctcacggcttcgtgcgagaaggtggggctgccgtgctcgatgcgcaccatgtattgctccaccaggcgttccgccgttttggtggccttccagccgcaagtggcgcgctggttgagcgggtcgctggtgccgccggagccgagcgccttcacgatgtgctccaatccgccgccggtgatggtggtcacgccataggcgcccgcgcccaataccagcgtgaggtagatggcgctgccgtccttgcccgcgcccgcgccgcacaccacggcgccctgggatacgtcctttacggccgcgctcaccgtgaggctggccgcgcccgcgtcgccggcggtggcgccggtgagcgtggcttccttgccgcccacgtagatcttcacggtttcgccgccggaaatgcgcgcggagagcgcggcggcctgcgcggaagtgatttcctcttccacggcgatggtggtggaacccgtcgaattcagcgcggtgcgcagcttcatgcggcacacgccttccacgatttcgcccgggccgatgaccttggcctccgtggtctccacaaagcgcacgccggcaatcttgccgatttcgccgaaatagatgttttccggctgcgcgtacttgtgtgcctcgatccattcctcgttgcccatgaggtcgcaggcgatgtctggatggatgatggccacgtagctgtcgtcgatcttgggcgcgttctggcgcttgagccgcgcggcgaccaggcgaatcaagcggggcgtcagttcgcaatccgccgtcacgtcttcgcgcagttccacggccgtgcccgtgccgtccgacttgggcgcgaagactttgttcgtgcccgcggtgagcacctcgcgggtgatggtatccagcgtgcggctggcctgtccggccaggcgcttggtggtttccaccatcatggggtcgatggcggtcaaatcgagcatatcggagatcggcacaaaatcgccgtattgccccacttcggcgatcaccttgctcacgttcagcttgttgccctggggcgttacgccctcggtcaactgggtgagcgccttgggcagcgaatcgatcttgcggaactcgatggttttgccgccgttcttggggatggggtattgcgtgccgaactggtcgtgcaccagcgcgggctgcgcggtttcgatcagttgcttttcgtaaaaggttttcatctccgccgaaaggctgttgccttcggcgttgagcagcgtggtttgcacttcgtaatctggcataaaacttcctccttattttcgattgggttagagcacgattcgctccccgcgcatggcgcggcgggccaaatcctcgcgctcctcgcgcgtcatctcgcttacggtcttttcgcgcggctgcgcgggcgcttgggcctgcgcgccgttttccacggggcggcccgcgcgggcgcggatgttttccgcggtttccttggcggcgcgctgcgcggcataggccatcgcgctggagagcaattcatccttgtgcgcgatttcataggccgttttgatgtccacgcccgcgcgggcgatggcggcaaagcgcggattgcgcatttccgcggcgagatcgaattgcggatacgcgcctttcgtttcttccatttgccttgccacatccgcgcggcgctgtccggcgcgcgccgcccgctgggccgccgcgcgctccatggcgcggggcagttcgctttcactcacgccgtagtgttcgctcagcgctttggccacgggttccagcgccttcatgcgttcctccgtggcgcgcgcctgcttaaagcgccggtcgagcgccgcctgcatcttggcctgataggcgtccttgaattcgccgcggatcagctcgtcgaaccgttcctgggccgaaggcgcgctatccgcctcctgcggcgccgcgttctcttgcgcctggggcatggctcccgccatcagcgccggggccgcgccgtcctccaggtgcgggtgcaaaaattgcatgcgttccaacatggtctcccatcctttccgcggtctttcccgcgcgtatgttccggcgtattacgccgtctgtttatactatacgcgggtgtatatacgatttctacccgaaatcgaaaatttgttcgcattattacaaaagcacatttttcctttacccgcgcgcttgcagcggcgcgcgcaaaatgctatactggcactatgaaatacggagggattgcggtatggaaccaaggacgggaaacccggtgggcaaagaattgcatttgcgcatggaccatatggaagaggtgcgcgtggtggcgcacgcgctatccagcgatgtgcgcttgcgcattttggccatgatcggcgccaccagcatgaatgtgaacgaaatcgcccgcgaactgggcgcgccggtttccaccacggcgctcaacatccaggtgctggagcgcgcggggctggtttcctgcgagatgcagccgggcacgcgcggcgcaatgaagatgtgcgtgcgcggcatcgaccgcgtgcacatttcgctttctcccacgccgcgcggcgagcggcgcgtttgggaatgcgaaatgcccgtgggctgctatgcgctggtgggcggcgtgcagccgacctgcggcatggccaaccgcaattgcaagatgaacgcggacgacgatccccgctccttttaccggcccaaccattttgaggcggatcttttgtggatgcgcgcgggctttgtggaataccattttccgcccgcggatgtgccgctcaaccgggtggattttttggaattgtcgtttgaggcctgctcggaaacgctggggcacaacaaccgttggcccagcagcatttatgtggaaatcaatgggcagcgcctgggcgtgtggcattgcgagggcgattttggcggccggcgcggccagttgaatccgccctggtgggacgcgacgaacacgcagtttggccaactaaaaacctggcgcgtggaccggcacaggacgtatctggatggcgacgcgctttccaacgtcaacttggaaaaaattcatttaaaccacgagcaggatcacatccgcgtgcgcatcggcgtgcaggaagaagaggggcacacgggcggcatgaacctatttggcgatcatttcggcgatttcccgcaggggctgattctgcgggcgggttattataccgcatgagcgaaatgcggaagccatttattccataatttatgtattaataaaaagggattgacagcgccttttttccgtgatacaatacgttttgagcgaaaatgcaagggagatttgcaggatttgcgcagcggctatgaagcggcggcttctaaacatacataaaatatgtatggtttgtggcggcgatcgggcggctggattttcaaaggatagaggggtgttttttatgcggcaacaaggggctgcgctcgcgccacggcatggtttgcgcaaggatttccgcaagaaccgcgcgctgtatgcgatgattttgccgggacttgtgcttttgattgtgtttaagtatttccccatgtatggtttgatcgcggcgttccaggattacaatcccttccggggctattggggctcgccgatggtgggcctcaagcattttgagcgctttttccgcgatccatactgttggcggctgatccgcaacacgtttttgttgggcgcgtaccacatcctgtggacgttccccgcggcgattgtgctggcgctgattctcaacgaactgcgctatccgcgctttaagcgcgtggtgcagacgatttcctacatgccgtatttcctctccacggtgatcgtggtgggcatgatgaagagcctgctttccagtacgggcatcgtcaaccaggcgctgatcaagctggggattctcgatacgggcatcgccttttttgccgagccggaatggttccgcacgctgtatatttcttcagcgctgtggcagggcgtgggctacaattccatcatctacctaggcgcgatggccaacatcaacacggagctatacgaatccgccaccatcgacggcgcgaaccgcatccagcagatcgtacacatcacggtgccgggcatcctgcccacgatcatgatcctgttcatcctggccatggcgggcatcctgggcaacgattaccagaagattttgctcatgtattcgccgcgcacctattccacggcggatgtgatttccacctatgtttaccgccagggcatcgaaacgggcggcatcgcgggctttagctattccacggcggtgggcttggtttccacggtggtttcgctggtgttcctgctggcgaccaacctgatcgtgtccaaagtgggcgaaacttcgctattttaggaggtgtgcgtatgacggcgatggtgcaacatcacagaaagaagacgacggggttcgatatcgtcatcgtaattcttctcatcgtgctttcggccatttttctctatccgctgattgtcacgctatccacctccatcagcgacccggcggtgatgaattcccgccaagtgtggctgttgccctacggcttttcactagaggcgtacaaaacgctgctcagcggctcggaaattttgcaatactatctcaacaccattttgtatgcgttctgcggcacgctcatcatgctggtgtgcacggccatgctggcctatccgcttacgtatcagaccttcgccctgcgcaagccgctcacggcgctgcttttgatcaccatgttctttggcggcggcctggtgcccagctatttgaacatccagatgctgggcatgcgcgataccatctgggcgatgattttgccgggcgcgatttcggcctataacgtggtggtgttccgcacgttcttcaagggcatcccggattcgctggccgaatccgccaccatcgatggcgcgggccatttccgcgtgctgttttccatcatcctgcccctgtccaaggcgctgctggccacgttcacgctctttagcgtggtgggctattggaacgactatatgagcgcgctgctctatctcgatagcgagagcaagttccccatccagttgttcctgcgcaaaattttgaacagcatgcgcatggacgacatcgccgattattccctgctcacgcagctccagcgggtgaacaccagcacggtgcaaaacgcggccatcatcatcaccatcgtgccgattctgtgcgtgtacccgtttttgcaaaagcactttgccaagggcgtgctgatcggctcggtgaaggggtaatgttgggggccatacgggcgtttgcccgataaaatacggcggcatgtgccgccaagggccaaatcaaattgggaggaatctttatgcgcaaaatcgtaatctggcttctgctcgcggcgttcgtgctcagttgcttgccggctgtggcggaaacaatgctgccctacaacgagggcgaagagctggtgtacaccggccttgccgcggacctcggcatggaaaacaacgaagaatcgcccgtgatgcaggcgtatcgcgagcgcacgggccacaatgtccgcattgaatggacgaccctgggctgggacgactggctcgaccgcctgaacgtgatgtgcaacgcgggcaacattccggacatcctgtgggtcaccccggtgtcggatttcatctattcctatggcagctatggcatgttcctcaacctgcgcgattacgcggaatacatgcccaactggatggaaatcaacgaaacccgctcggcctatagctccctgtggggcgaaaacgacgagatctacgccgtcaccgacgtggatgaatacgacgtgggccacgagaccttcttcatcaaccagaccgcgctggacgagctcggcgccgaagcgcccagcacctgggccgaggccatcgcgctgatggagcagtataaggcgctttatccggattccgtgcccttcttcacccatatgaagagcgtggaacaggccatcatgtattcgctcaacggccgcaccggcatgttcttcaacgaggaaaccaacgcctgggatcacgcgctgctggccgaggatcagagccactataaggccatcgtggagctgatgcacgaaatgtatagcaagggcctcatcagccccgaatacgacatcatgaccgacgaacagcgcatgcagatcttcagcgcgggcaattggctgatttgctggtccactggcagctatccgggcggcgcgttcaactacgatttcgacgccgttccctacgaggtttccaacctgctcccgcccaccctcaacgagggcgacacgcgctataactttgtgaacttccgcgccgacctgcccggcgactacggctatctcatcagcgcgaacgtggaacagccggaagtgatgtgcagcctgctggactatatgatctcggaggaagcgtccctgctgttcaactggggcattgagggcgaaacctatgcgttcaatgagaacggcaagcccgagtacattggcgaatacgctaccgacgcgcaggcgcgcctggatgcgggcatctacaatttcgatgacctgcgctatatcatgtataaggaccgctattccgatttcgcgcgcatgagcgacgcggagctggaaggctaccgcaacctcaatgagttcttccgctccggccaggtggaggcgtggatccccgcgcgcaacacgccggtgatgaacgaggaacagcgcaacaccgtcgccatgaacctcacgccgatcagcacctatatcacggagaacgtgggcctgttcgtcacgggcgaccgcgatttgtccgaatgggacgcgtttgtggaagaggccatgagcatgggcgatatcgaggccgtgaaggcagcctatgaggcgggccgccaggtgatcgcctccgatacgcgcaattggatggaattctaatacaaacgactgaaccgaatgggggactgcctcggccgaggcagtcccctctgatcgttgacaaacctttggtttgtcaacgagggattacccggccgcttgcaaatcaaagatttgcggccagcgaccgggacgggaatgtatttttacgtttcgcaccgccctcgccttacggcggcgcggtgttccgtgcctgcgcacttcgtgtgctcggcacttcagcccttcgggccttcgccttttcgcaagcatttgctcccgaaaaataccagaaatgacgtacacgccgtcatttctgattagaaccttttttctttcgagactttgtcaatagtctagggggactgtctcggccgaggcagtcccctcaacgatcaaacgccgcccaccgggaaaacaaaaaccggtgggcggcgtttcaatggaaaacaagcgtttaaaacaaccgctggaaaatccgactggcgcaggccaaatccacgggtgcgggatggtttttgagcagccgctgctgcaaaagcgcgtattcggccagcgagggaatgtccgcgggcgagagcccatattgcccgatgccggggaggggcagctcctggatcagcgcgcggatcgcctcgtattccggtagacgcgcgcggatatccggcagcgtctcttccatcacgggcgcaaacagcagcgcgttggccacgccgtgaggcacgccgtggcggctgagggcgtaggccagggcgtggacggccgtggtgcccgcgagggaaagcgcgacgccgccccagaaactggcataaagcatgcccatgcgcgccgatagatccgcgccgttttccacgcacgcgcgcaggcagcgcagagccatttgcagcccgccttgcgaatagaagcggctcacgcccgtggcgcggacggacaaaaaggattccgccaggtggcagatggcgtccacgcccgtatagctcgtgatggcaggcggcaggccctttgtgagcgtgggatccaacacggctaggtcgcaaacacaggcgggcgagatcagcgcgcgcttgctggcgtctccgtcgtcgatgagcagggcattgggcgtggtttcgctgcccgtgcccgcggtggtgggcacggcggccaggaacgcgcgccgcgtttggggcggcgcggcaagggcttcttctatggagagagtaccttccagcgcgaccgccacggccttcgccacgtccatcacgctaccgccgcccatgccgacgatggcggccgcgttcttttggcgcaagccggcaagcgcggcttgcgcgtcgctcatgcgcggttcgcgcgaggggagcaggataaattgcgcgcccttcagcgcggcttgcgcgcgggcgtacaggggcgttccggcgagtccggcgtcaaaaaataccgccgtagcgcccgcgggcaattggaaagatagcgcttccagcgcgccttcgcccgccaaaatttgggtgggcaacaggtttttcgtcgattccacaagggtattttgcatcattgtattcctctatattgcgtattgagcatctctaaaatggcggttttcccttcttcgccaatcgtatcgaaggggcggcggctcggcccggcggacaggcccaacaaattggccgccagcttgatcacgggaccggaagaaccgtagcggaacagggtgcgaatcgggcggatgcgctcctgcgcctgccgggcacgcggcaggtcgcccgctttccaggcctcgtaaatggccgccatcgtctggggaaacaggttggcgacgccgcaaatgccgccgctgccgcccgccatcagcgtccacagcagcagcgagtcgttgccgctgagcacgtggaagccctccggcacggattccagatattgcaaaatctgctcgaaatttccgctggaatccttcacgccgatgatgttggggatctgcgccaggcgagctaccgtggcgggcgccaggttcacgcccgtgcgcgcggggatgttgtacagaatgatcggcaagctgaccgccgcggcgatttcgctaaaatgcgcgtacaggccttcttgcgacacgggcgcgaaataggggcatacgatggatagcgcgtccacgcccaaccgctgggcttctttggatagctcgatggtttcccgcgtgccacacaggccgctgccaaaatacacgggcactttgccctccgcctcacgcagcacgctttccgccaggcgcagcttttcctgcggcgaaagcgcgtaggcctcgccgttggtgcccgccacaaacagcccgtgcacgccggcggcgatttgccgcgcggccaggcggcgcatctgttcgcagtggatgctttcatcctcgtgcatgggtgaaagcagggccgcgataacgccttcggcaatgttcatggcaaaattcctcctctcgttttatcggtgggatacaatgcgttctagggcggattcgcccccgaggccgccggattttgtgagcagcgcgacgcgcccggcggcgcagtccatttcgttgagaatgacgccgtcccccagcgggcgcagaacgcgcagcgcgtgcgcgcccgccgcttccaggatggcttcgagcgtgtcgccgcccaccaccagcagcgtttgcggcaagcacaaagccagcgcagcgctggcggcgctggcgagggaatgggccaaatgggcggagagcgcttgcggcgcaaaacccgcgtttaggcccttttgccagatggcgtctgcttccgggcggttcagggccgccgccagcaaagcggtgtgcccctggcgcagcgcctgcgccgcgctttgcgcggccttggcggcgccatccgccgcaaagggctgaaagggaatttgcataacgccctgcaggcgcgctagctgggaaaaagccgctgcgtgtacgctgccggaaaccaacaacgccgcgcctggccgcggcgcaaagggcgcggcgctttgcgcgccgggaacccatgcctgcgccagggcttccgccaggccggcgcagcccgcccataccgcttgcgcgtcgagcgcgcaaatctgcttgacggccgcgtccatctgcgcctggttccaggcgttttgcaggcaaatgcacttttctcgcggcgcgggcagccggtcgaaagcgatgggcaattgcgtttcttcgcgcagaatttccgcgatcgcgtcgtgccgcacgggattttgcggatccgccccataggcgctctggctcacggggacgccgtcgatccatagcgcgccaccgcgcacaacgcgccccgcggcgggataggcgggcacaaaatagacgccgcaatccagcgcttgcaccagcgcttccatgcaggcgccaatgtggccccgcagggcggaatccgttttgagcaagaactggcgcgcgcccaggcgctgggcctggcgcacgcacgcgcgcgcgatttccgcggcttcggcgggcgctttgtggcggcagcgcatgttgaaaaccgccacgtccgcgccgcttgcgccgtccatcgcctccgcgcgccaaaaaatccgggtttctaggccgcgggcggagaactgcgcgcccgtatccagggcgccggtcaaatcgtccgccaaaatggccaggcgcggcggcatcttagcctccggccattcgcgcggccatgcgaatggcgtctatcatgctttgcgggttggcccggtttttgcccgcctggtcgaaggcggtgccgtggtccacgctcgtgcggatgatgggcaggcccacggtgatgttcacgccgcccacggcagagaaggcgcccgttgcctcgtccatatggaagccgagcagcttgacggggatgtgcccctggtcgtgatacatggcgacggccatatcgtattggccagacgccgccttgacgaacaccgtatccggcggcacggggccggtggcgtcgatgccctcttgccgggcatcggcaatggcaggcgcaatggcgcgcgcctcttcccagccaaacaggccgttttccgagcagtgcgggtttagcccggccaccgcgatgcgggcagtgggcaggcgcaactggcgcgccgccaggtttgccaggcggatcgtggcgagcacgcgttcccgcgtgatcaaatcgcaggcttgccgcagggaaacgtgggtggtgcagtggatcacgcgcaatggcccgtgcaccaatagcatggcgtattccttcgcgcccgtgtaatgtgcgaagatttccgtgtggccagaaaaattgtgcccgctcaggtgcagcgcttctttattgatgggcgcggtcgccacggcggcggcttgcccctcctgggtcaggcgaatggcctccacaatgcaggcaaacgccgcctccgccgccccggcgtctactttgcccggcgcaaagcgcgcgttttccgggcaggacgcgggctgcaggaattcgatgcagccgcattctccctgcgcttctccgggcgcggacagccgcttcagccgcgcctttgcgccggattgcgcggcggcctcgctgagcgcggcttccgtgcccacgatcaccggcttgcacagttcgtataaagaaggctccatcagggctttcacggcgacttccgggccgatgcccgccgggtcgcccatggtaatcaaaatgatcggtcgcatggcttcacccctgttcacaaaatgggcggaggctggtgcgggttgcgcacagcctccgccagccgctgaatttgcagcttgctatttatccgttgaccgaatcccaccactcgttggcttcctgggtgagcacgtcgccgcccatggcgaaccattcggccacgatgtcgtcccactgggtttccacatcgatatcgccgcgcaccgccatatagatgttgttggtgatgtaggtgctggtgatctccgaatactcggaggcggagggcagggagaccgtgagcgcgtcggaaacgccgttaaagctggcgaacagcggcagcgtgcgttcatagcgctggtcgttgcgcgcgtcggaaatcacggtgaggaattcggggttgctccagtacatcgggaacaggcaccagccatagcccagaatctggccctgcggatggtagtcttcttcctcggtgtagttggggttgtaggaacgggtgccgtcttcctcttgcagccactgcaggccctcagggccgaagtggagcatgtaggtttcctcgtccatggcttcctgctccaggatctgcaggatcttggccaccttttcgtcgctggtattcgcgccgaagcacaggtagctgttcacgttgccttccttcacatagccgccgggcgtgccgtcgctgttggcgaccggcgcgaggttgatgtagtatttggaaacgtagctgtcgtcaaaatcgctggtcacgccgtacttgtacatttccgtgggattctccgcgttgtcggcaaagtactgctgccacgtcgcgtcgttggccacccacttggcgctcatgtggccgtcgttgtcccactgataatcgtcgtagctgaggcaatcgatatagccgatctggccggaagcaaatttgctggccacgtcggtgccgctggagcgggcgtcagtggtgatgaattccggatcgatcaggccgtcggcgtaccacttgctcagcagtttcagggcttccttcacctcatccgtggtgaagccgtattccagctcgccctcttcgttctccgtccagaagagcgggttcacgccaaagatgccgaagatggactggaacatatagcggcccatggcgccggaattgccgccagcagaaagggcgtaggtatcgtcctggccgttgccgtccggatcgtcctgcgcaaaggcgtagaatacggcttccagctcttccagcgtggtgggcacggcgaggcccaggttttccagccaatccgagcggatggccgcgccgatggcggcttcgccggtggcgttgtagcggggcacggcgtagatctcattgtccacaatgcccttgtcgaagaagccgggatcgtagctggtgcacatcgcgtaatacccaggcatgttctcctcgatcatctccagggtaacggggcgcacaatgccctggtccaccaggtcggcaaggcgcgaaacggaaccggccaggatgaagtccggcacttcgccagaggcgaacagcacggtctgctcctcggcggtttccgcgcgcacgatctgcacgtccacgccaaaggcctcttcaaaggcctgctcgccccaggtatcgtccgtgaggggtggcgaagcgcccagccaggtgatgaccatgggctcttccgtcgcgggttcttcttccgcgctggctacaaacacttgcgccgaaagcatcagcgccaggatgagcagcagggaaacgaactttttcatgatggtttcctcctccaattttatatcacgcgcgtggcgcatgattccaagaacgcaaggggcggcaatccgctctgcctatccctttaccgcgcccagcaccatgcccttggtgaaatagcggcgcacaaagggatagatgatgagcaccggaatcaccgtgatcataatgcccgcggcgcgcatgctctcctcggtgggctggttcgccttgccgccggagatatagctgccggacatcagcatgccgctttgctcgatcaccagccgccggatatgcgcctgcaccacttgcttttccagcgaggtgatgtacagcgtggaatcgaaccaactgttccagtggccaaagaacgaccagcagccgatggtcatcagcgacgggatggtgatgggcagcacaatccggaaaaaaatctgcatcacggacgcaccgtcgatctccgcggcctcctccagcgcgtcgggcaggtcggtatagaacgtgcgcaacagcaggatatagtaggtggagaacatgcccggcacgatcagcacccacagattgtcgatcaggccaatatcccggatcaccaggtaggtgggaatcaggccgccggtgaaaaacatattgatcatcaaaaaccaggtgaaaaccttgcggcccggcaaatcctttttcgccaaaggataggcggtgatcgccgtgcagaaaaccgtggccaccgggcccaccagcgagcggaaaatggtgaccataaagccgctgcggatgtaatcctggctaagcagtttctcatagcccagcagcgtgaaccccgccggaaccagcataagcggattgtgttcgcccgccaggccgccatacgtggaaagcgaatacatcaatagataatacagtggatatagaaccgaaaagataaagatgcccatgcccgcgtaaatcaggactttgaacaccacgtttcggccattgcggtcggttagcacagacatttttccgtttcccccttagaacaggcccgattggccaatgcgcttggcaaaccaattggtcaggagcaccagcatcaggttgatgacgtttttcagtaggcccacggccgaagaatagctgtatttgctgctttcaatgcccagccggtacacataggtatcgatgatatccagcttgtccatggtggcgctgttgtagaggttaaagatctggtcgaatccggcgctcatcatagagcccaccttcaaaaccatcaccaccacgatggtgcccgcgatgcacggcagcgtgacgtgtatcatctgctgccaacggcccgcgccgtcgatttccgccgcctcgtacagctccggcgagatagccgcgatggccgccgtgaagatgatggaattccagccggcggattcccaaatatcgctgataatgatgatgaacagcgcccagttgctatcgcccaaaaagtaaatgctctccccgcccagcgcggtaatcacgtaattgatcacgcccgtggaaggcgaggccatttcccggatgatggaggcgatgaccacccaggaaaagaagtgcggcagcatggtgatgctggcggaaaacgcgcggtatttcttgccggcgatttcgttgagcagcagcgccagcaccaggccggatgtgctcacgaacaccaacttgatcaggctgatgtacaccgtgttgcccgcggcgcgccagaacatccggtcggtggccatttttgcaaaatgttccaggccagcccattcgctgccggtgatgcccttgagcactttgaaatcccggaaggcgatttgcaggccgtagagcggcccataggcaaaaatgatgtaccatatcagcgcggggatcaaaaatacgtatagccagcggtatttccagatgcgccgcgaaagccctttgcggatccgcggcgcggtttcgctcctcgtcaagttccctctccccttccctgctattcgccggtgatccacgcctcggcgatgcggtggtaaaaaatgcagtccctgccatggtgcgtgtagctgatgtggaggttcccatcgcgcgattgcaggatggagggataatggtattgccggttcagccgctgctgcccctcggccaggaaattttcgcccgtttcgatggagcgcatataggggaaagtttcgccctcgtcttccgtcagcgcgatggtcacgggcgagcggcggccgggccagcacacggcggtgggatcgtcgcccgcgctatagtggttgaacaccagcgcgatgcgcccgctcgccagctttttcgcctggatggaggcgttgttgttgggcaggcaagtggcgcgcggctgtgtccacgtgcggccatagtccagcgaaagggatttgtagatgcggtcggccgagcggctgcggaaaaacgcgaccaagcggccgggcgcggtttccacgatggacatgtgtacccgccgcacgctgccgggcaccgggtattcatgccaggtcgcgccctggtcgctggaaatctgcacggcggaatagtcccggccgtattgcggcttgttcgcgtcctcctcgcccaggctataccacatggggaaaatccactccccgttggaaaggggcaaaatgggatggcggcaaaaggagccgggcttatcgaacagcacttcggcctcgccccaggtgcggccgccatcgcgcgaaatcctgcgccggatctgcgcggtttcctgcatgctaaagtggcctttttcctcgccgcggcgcactttttcgtaccattcttccacgcgcatcgtgccccgggagagttgcgcggtgtagagcagccacaattcgcccgacggcgtttcaaacaaagaggggttttgttccgagcacgtgtaatcgtccgaaaccagttgcggttccgcccagcggtttgtgcccgcgtccagccgggaaagggcgattttgatgtccgccgatccttccgaaagccccgcgaaccagcagcaaaggagatccccgtttttcagctcgatcaaattggaggcgtggttggaaacccactgcgtggggatataggccttgatatgcgcttcgtacccgtgttcggcaaatagctggccatcccgcacaatctggttcaggtcgataatgccggccataaaatctcccttctttcccatggaatttttgcttcctatgttctatatgccaagtagtataaaaaatcgtctggaatctgtcaatagaaatggctggaatctgcacaaaagtcaaatgccatgcacaaaaatgcatgcgcgcaaaaaaagagccactgtcgtggcactggctcagaggctgtcgaaaaacctaggggaaagcgcgaaagagccgaagtccttttgcgctttgcgcgtctcttttgtcaatccttccgtcacggcttgcgccgtgtcacctcccgatccctcc

SEQ ID NO: 4508 - DNA, 32759 bp, Unknown
  16S sequences of unknown bacteria
aagagaagcaatggctttgcaggaagcggatgttgcctgattgactttacgcacaactctacgctttggagatttttcaaaaaatatctcaaaaccacttgacagaagggctcacagcagcacaggaacgctccctgttcagcagtgccattaacccggctgagtgcgaccgcatcatcactctttccacctgcagctacgagttctacaacgcacgatttgtagtcctgggaaaaatctcttgacttgggccgtacatatgctatcataaaagtaaaaacagaaggaaaaggagttatcccatgaaagttctttttatcggcaacagccatacctttgtccactatgttccggccaggacagcagaattctgtaaaagttacggccagcccatagagcctgtcatgctcacacatcccggtatgggcctggattggcacctgcggcagtcccagacttacttcaaccttttgtggggcggctatgacgccgtaatcttgcagcacaacgcccacccctttccgggcaaggaatccctgttggaggcgggggaacaaatggcagcgatcacgccggagggtacgaaaatttatctgtacatgacctggagcgagaaaagcaacccggctgggcaagcggccatgagcgcggcttatgaagctttggcagaaaagattgacgcgactatctgtcctgtgggacgtatctggtggcagaccgcggcggcccacccggatgaagaactctattttgccgatggagaacacagctctgtgctgggcgcgtccctggcagcagcggttatcgggcgcacgctgctgggcatggaggtcacgccggagggttgctatgcagatgccaagagcttggaaaggatgcggcttgatccccgaatgattgacttggttttgaagaatggaaagccggatatggcttgaggagcaaaatttatttgggttcaacgcaaattgtcctgttccccgaaaataccgtaaaagcacgcgagggtttgaccttgcgtgctttttgtcaatatgatttggactcacgcctttttactgagcgataaaataccgtcgctctcccgctgcctgtccctgctcgcttccgtccggcagccgtacaagagcccggcagttggccggtatggcgacctcaaattccaggccttcactgctgcgcttccacccgcaagagacctttccatacacgctggcgtactccgcttttgcactggtgaaatgcccgccggggcgaggcgcgatgataaactcattttcaccgcctagccggataccgcacatggtgtcgaacacccactgaatcaccgcgcccttggagtaatggttcagcgaggccggagcgtcgctttcagtgccctcccagttttcccagatggtggtagcgcccagcttgggcatacagagccacccgggcagctcctgattttccagcagccggtaggcgtactcaatgtccatgtctgccagaacatagagaatgagcggggttgacaagaacccggtccccagccgccagccataattttccagcgcctgcagcagacgcttacgggcataaccggtctgctcctcatccaaaagcttcataaagagcggccgtaccagtttggcttggcggtctgtgtccaggctgtgcttctgcgtgcgtaccaacgcttggtagccttcccgggcggccccggcacagcgggagaactcctccgcgtcctgggatcggtccagctcccgggcaatctctgccatgcgctccatcagaaggacgatataagcggtggattcctccgggtgggggcttacaaagtctgctgtgcggaatgggtgcacatcggcaggctccgcccactctccgtaggactggccgtaattgcagattttcttacggtctttccggctgagcccggtgggcaaggctgtcaggtagcgcttacccagggtgccggctttgtaccgggcgtagcggcacatggccccataattttcctcaaggatgctccagtcaccgtacatccgggcgatgtcaaagggaatgaacacccccgcgtccgaccacccggcggatccgtccatggggcgcatatagccgtcaaccccgccgcccggcacgatttgcggaaaacagccgttcttgtgctgcgcgtcggtgagatcgcgctggtatttcctggccatggccgcgtagtcgaacaggtagcaggcggtggtacagaatatctgcgcgtctcctgtccagccgtgacgctcccgggtggggcagtcggtgggcagatcggcgtggttgttccgggcgctccacagggtgcagtcgaacaggcggttcagcagtgggtcggagctctcgaaccacccggtacgctccatatcggagtacacggctatggcggtgaattccgcctgctccatggggaagtcaccctccgccagcacataccggaaaccaaagatagcgaaggccgttttgtaatcgttgcgcccctcccggcagatatactccacctgctgcaagggggtggtgcgctttttgttgacgcactggatgttcctttgggtgaactctccgtccttgtccagcatctccccaaactgcagctttacccgctggccggccttagcctttaatgaaaactcaacatagcccgcgatattctgcccgaagtccagcacgattttgccgccgggggtatggacgacctgcggccggaaccgttcatgctccgtaaccggcacattgttggacgcggagggcactaccgggcaagacgtttcccgaacctttccgctgtagcttggtaacatcctcccgtctacaacttcaccgtccttgttgtcggcaaagcggatagggccgtcattgctccaggcccaggagccgtcgctacaaatggtatggatattaccgctttcatccgcatattccagctgagccagcagcttggtctgggtaccgtactgattgagcagcccccaggccccgcagctgccccggtaccagccgtctgccagctggacctccaggcggttctccccctccttcagcagggcggtcacgtcgtaggtctggtactgcattcttttgcggtaatcggtgtggccgggggccagcacgaaatcccccacccggctgccgttcagccgtgcctcgtacagcccacaggcggtgatatagagcctcgcccttcccgcgccggaaacgggaaagcgcttgtaaaagcagtccaccgggtaacggcggcgcttatccacatcatagtccccgcgatccaccgggcctgccagggctcccccttcggcaggcctgtctcaaaggtggcgctgctccactcgcccgggacgttgttttcatcccataggcgcacgctccacgtaacccgggtgcggggagggaccggcttgcctccccagtgcgcccgcatggatgggctttccacacggccgctctcccacagggtgcggccatcctccgctgtggccgctatttcataggcggtttggcgggcaccgccctggcagttccaaaagagcctgggacggtcgatgtcaatgcccaccggctcaaagagaaattcggttttcagtctgatggctttcataccctatacctcagcggatggccaggctcaccggaccggagggtgtctggatccggcaaatatacctgccgtcgcccagcggctccaggctggtggatagctcctgcgggcagacaaattccttgggttcaaagggcaggtagagtctgctctcgccgccatcgctgtcgaagtccatggcgtattctctggcccgtctgtcataatggtacttccggagcgttccggcggtctccatgggataggcccggcacagggcagagaagttggggtcctcctccatgccgaggtggtactcgcagtaggcgctgccccacaggttgcgctcaataatactgttcatatggtcgatgaggtcgttggtgaactctctggatgggaacgcgccccattccgccgcgatggtcggcaggccaagccgctcctgggtctggcgcttgccggcgtagagccgctccacgttttccttactgaatgcctcgtagcggtcggaatccaccaccgagtcatagccgtggggggcgtagatctgcgggccgtttgtcaggcgcccgatgccggtgggcacgtcggtactgcaatagatgttccccccggtgacgatggccttcccgctgtggggacggatggccttctccatgcggcggtagaaatccatcagcacggtgcggtcaaattccagaaagcgctccgacaccagcgccataaactccccggcctgctcgggcgggatggtttccgggtggttcatgtcaaaggccgggtacttctccatcattttcatggtggccgcgccgaaggattcccgggcgaggctgcccataaaaggctcgttcatgggctcaaagccgatgatatttccgcagccatccagggcctccgcgattttcccccacatagcggcatagtggtccagcaggcccacgccgtccgaagccggtttgtttgcccagaaattgtccgccgcccggatgatagcgtcgctttgcaggtaggcctcgtaccagagcttacagtgctccgggtggggcaggccttcgtccaggcatgcccagtcaggcgcgccgtcgatgaacttctgggcaaacaggtcctggtgcatatcaagcaaaatgtagatgccattttcctccgccaggttcacaatatccttcactttccggagatactccatatccacctgccccggctccggctccgcgccgtcccagaagatgccgaagcgcagcaggttgaagccggaacgcctgaagtagccgaaagctttctcaaatcccggatagaagtggttgttctccctttgcctttgcaaaacattcaggccgtggaggatgacctccttaccgctctcgtttacaaacgtgtaccttttcgtgtaagcttttccatggttccctctcctttattttttgattccgtgccttgatttccgcctgttcctttgcaatgattttttccacattgaggaacaggagcagcccgattacgatgatgcctgtaacaatctctacaccaaaaaagcaaccggtaatgacgttctgggttgcggcgttttgcgtggccgctatggtctcttcacctgcgagcaccggggcaacatagccgtttgctgacagcagcagattgaataccccgctggaaagcccaaagcacagggtgaggatcaccgactggacggaggccgagaaaccgtccacccggtggccgcacttccactccatgtggtccagcacgtcggccatcagcgccgcgaacacataggcgcagggccgggccttgccgcctttggtgcgggtgcggtcgatgatctgccccataatgaggttcgtcaccgcgtcgatagccttgctgatgatggggaacagggccaggaacgatccgctccatacgccggtaaggttcagcacatcggtgtagtacacgttcaggtaggaacccagcaccgcgttgagcagcagcgcccccgccggccccaccaggtagcccagccatttctcctttgggctcacggcatcgcctgtgattttgcttttaggcagccagccccatttttctttggcggattccatatcaagcgcctccttctgtcatttatcatacaggaaatgccggaaattgtcttgtaattttgtcggttttaaggtaaaattgtaacagatttttcaggaggcagttatggactacaactatctcgcggagtctcttgccgctctggccggggtgccggtgcgtatctaccgggacggccgctttctgagcctgcaccacacacaattcaagccggacttcgccataaccgaggaggaaaatatcttcaaaatcgccggggacgtgggctactatatggatccgaacttcctgtactgcgggctgttccgcataagaggggaggacattgctctggtcatcggtccggtgtccccgtccccggtaagcaggaaccttgcccggaaaattctggcccgcatgggcgagccggtgagccgcacccaggaggtgctggactacttttcggttatgcccgcctaccccctgcgaaactttttgcagatcctatgcaccatccaatatttcattaacggggagaaggtaagcgtgtccagcttcctgctggacgaggaggacccgccgaaactcccggccttttatgccccggatatgcccgcgccggagcatttcatgcacaacaccctggagctggaggagcggctgctgtccaacgtggagcatggccgggcggatgagatcgaaaagctgtttcagcgcccggcggagggccgggccggaagcatggccggcagcgccctgcggcaggagaagaacctgattatctgcacggcgactttggtttcccgggccgctatcaggggcgggctggacgtggaaacggccttttccctcagtgacgatttcatacagaaggccgagctcctggacaacctgaaggctctgaccaggctgaatgcccgtatggtgctggagtttgcccgccgcgtggaggatgttcgctgcggcacgagcggctccgtgttcatccgacgcgccagggagtacatcttgaccaacctcagcgagcccatcactaccgtggttctggcgaaagccttgggcatgaaccgtacccacctgtgtgagcgctttgtccgggagaccggcatgacggtcaacgcctttgtcaccgccgttaagatggatgaggccaagcggctgctggcggtcacgaagaaatccgcggtagagattgcggagtatctgggatattcctcccagagctactttgtgaaggtgttcgagaaaatacatgggatgactccgggggaatttcggaaggggtagcccattgatcagcttgttcctggtatggaaacctgcaaatgatgttgtacgcaagtgaaagctgcgttataatattggcatggaaaatcaacgaggaggctgcgcatgacggattatgaaaaaacgctggaattatggcggcgtaagaatgtgcagtcggacgtggaactggccgaagccctgaatgggtacagcatctcctttgcgtaccactccggcaaaatcgagaatggccgggtcacctaccacgatgtccgtgagattttcgatacgaagggcagccttgtcacaaggtatatctatgacacatggggcgatacgctctccgttaccgatgcaagcggcaaagccataaccgacccgctccacatagccaacatcaaccccatccgctaccgcggctactactacgatgcagaaaccgagctatactacttgcagtcgagatattatgagtttgaatatgaaggaaattgggaaaagaatatctgacagacgaaagaagttagggataaagcaaaatattttggcagaaaaactggatatttcaaacaatcatatgtctggaattgaaaacggaaaggcaactcccagtgtccgcgctacttgtgatgaacttaatgtgacacctgattttttgctgctggggagtatgcattcaaatcgagtttcaaaggatgcttctgacttgttgcaaaagtgctcagatcaagaaatagagatgattatgcagcttgtgcaacattttgtagagttgagagaacagaaagtagaaagtgacaaaatctccaagtcatgatataatcaaatatcatgtaggaggaaggtatgtagctttgcgaattcttttttgtgatgatgattcgaaaattttagctcaacttcagaaatacgtttgcgaatattttgaaaagggaaagctgaaacgtccagagatgaaagtgtatgtaagcggcgaagaactactcaaagcagaacaaaaggcagatattgcgtttttggatgttgaaatgccgggacgaagcggaatttatgttggggcagaattaatgaaaagaaaccctagaacaaaaatcgttattgtgacgtcctatccggattatttagacgaagctatgcgtttccgtgtttttcgttacctttctaaaccaattaataaaaatcgactttttgagaatttaaaggatgctatatatcaatataatatcgaaagtattcgtatcccagttgaaacaaaggatggagtggtaacactttcatcagaagatattatttgtttggaaggacaaaagaggggaacgaaaatttgtacggtagacggtgatttgatttcagtgaaaggaatccaatcctggcaagaagaactcaaaattcccagcttttacgcttcatatcgaaattatattatcaatatgaagtatgttgtatcctttagtaaggatttgatcaagttaaaatacgcgaatagagaaattagcgcatatctggcaaatcgccggtattctgagtttaaaaataaatatcttttatatatggaaggaatgcagtaatgtgggcattaatttgttatgcgtttgttttaacttcagaaggtattacggcttggagctactttgaacaagtatttgaacgaaaaggcagccgcaaagtagaaatatggatgtttattttagggtactcgctgttatttgctttgtcacaattcaaaaatgtactaataaatacagttgctttcttatttgtaaatttgatcttactgttttcgaattttgcatgcaaaaaattaataggaatcatacaagtggcatttttaacagtggttatgggagggacggagattttagctgctgtattacttttacctatatctcatgattttggagcatataagtatgatttatctgtcatgatctcttttgctgtgttgggacgtcttctatatttttccattatgcaaatcagtgctaggctttttaaaccaacaaaagacggtatagatacaagtacagttcttttactatctgtactaccattagtatcagtacttattacgatgacgattacctatattagtataactacacgaattaaaccgattgttggcatattgatggcaattagtgtcattgcattactgatggttaatattttagtaacagttgtttataatcatatacagaaaatgtataatgatcgtttagaattggaactaattgctcagaaagctaaaatggatacggagaattataaaatactaaaagaccattatgatcatcaacgtgttctgatacatgatatacgtggtcatatgcaagtgatgaggggactgcttgaatcgaaaaattatgatgaacttgaaaattaccttttggatatggaacgggatccggctttgcaaaagatagcacgattatgtgataatacagttctgaatgtaattttagtccatcacgcatctatctgcaaatcgttaggcattgatgtcgattttgatattcgacagcattcggtagattttatatcagcttatgatattacagcaatttttgataacctacttactaatgccgaggatgcagcaaaaaataccagtgaaaaatatattaaactttctgctacgcagcaaggggaaactggagtgttgattacggttattaattcttgtaattctgctccagatatggatgaagatggaaatataaaaacgaagaaaaaagataaagaacaccacggtgtaggtctaaaaagtgtcaaacaagcggtacagcgttatcacggagtatcgagaatgtattatagcaatgaggaaaatagatttcacagtgtgattcatttgaccaaataaaactcatagtatttaatgaacagctcaagaatctgattgaaatgtcgggttcttgagctgtttttctgttttaagtcactattagatatataagcaaaaattgaagctgtgagtttgggtgcaaatattcatcaatacgtaatttcatgttttgtttttgtcattttgtgtattagatattgacttaatatgaattcacgatataattaagtcacagattataacgactatattgctaatttttgtggatgatatatgctgatgtttgtacaagtgaagtatcaactgcgcagccgcgggcggagcgtgctggttttgtgcattgcggtgctgcttgcggcctgcatggcgttttacgtggggaatatcggcgtgaacaaggctgcgctgcaaagcctttcggactccgtgccggtgacagtgcgcatcacgagccgaaacggcgcgaaaaccgcggggctgaacattgaggcgaagccgtttgaccacttgacagaggcgggcgtgcacgatgtgcgatgcaccgccgtggcggccggggcgttcagcccggaggtgcgcacgcaggagatgttcctcggcggcgacacgatcgtgcgcgcggggaattcgcttgaggcgctggagctttcggcagacaatctgcattttgcggacggccaaagcgcggcgtttttgagcggcgacagcgcgcagtgcgtcatcggcgaggattacgcggagcgaacgggattgcacccgggcgatacgctttcgcttgagatttacacggtgcggcagtccatgaacggcacgatctaccagatgatcggcgacgcggcacttgagatcatcggcacgcacagcgcgcccggcggtgcggacgtgattttgccagtcaatttcctgcgcacagaagcagaaactgcgggcgtatcatttttgtacgattcgtgcagcgcacttgtagacgacagcacgcatttgaaggactttaaagccgaaatgcagaaatattttatggacattaacccgagtgcggaggacccgaacgcgggcgacgcgctctccgtggaggacgagctatttgtgaaaacggcgagccgcctgcggcagaacatcgcgctgtttcaaagcatgctcgtgccgttttttgcgcttatcattgggcttgtggtgctgacgacttcattcatgctgccaaacggcacgatcgagtcgttcgacgcggcgctgcgtgtggccgtgccggagacaagcgagctcacgatcacctatgacgataacggctacggagaccttatgacgagcttaaataacgcgcggatgtctgcggtgctgctgtttgcgggcggcttgatcgcggtcgtgggcattgtggttttgttgctctacttctttatcgtcaagcagaaaaagcgcacggcgatcgagcggagtttgggcatgagcaaggcgcagtgccgcgtatcgctgatggcggggattttggttttggcgttggtagcgtctgtcatcggcgtcggcatcggtgcagttctgctgcaaagcgatgtgctgacgggtacggcacagtcggagacggaggagatcgacaccacgttcagcatttgggcgaagggccagacggaagtcacggagccggaaacggacgcgacggtgccggtcgcggtgtatgtattcatcccagtgtgcctgcttgtgttcatctttttgctttcgctggtacttgtgaaccgaaatttgaaaacggagcccatcctgcttttgagcgggaaaggggagtgaaatcataaaatgcattctaaaacatctaattgcttaaaatatagcatataaactggctatcgaaccgcggatagccagtttatcatatgaatttttagcgccacaaatttgtgactttatggagacaatataaatgaaaaataagattataagcatactagtagctattaatttgctttgccttgcgggctgtgcttcaaatgcggatgatatttacagcaaaaatatggcggcgacgccagagccgagcgtttctgcagaaagcgcggaaagcgaagacgcgaatacactttccggcacatggacgctggtgtgcccgcagtattccgccgtgcattacgagcggttcagcgggctgttcgcggaggaaattcccggcgtgacggtggagacggtgacgtacccagagaacggctaccgcgaaaaggtgcagcttgcgctggtgggcggcgaggagatcgatttgctggacacacagcttttatctgtgcgcgaccttgcaaacagcgggctggtgcgtgacctcggcgtgttttacgacaataatgcgcaagaagattatgtaaacatggtggacacataccgcgtggacggaaaactttatgaaatgccggtcacggtgttgccgatggcggtgtggacggacaagaaaatgacagagtcgctcggtgtagagttgccggaaacgttgagcttttccacgctgaatgactggacgcagcaagcagaaaaaggctcggaatactacatgatcaaagagtaccccaaggcttctgcggtcatgaacgagctttccgcgttcttggattttgatgagaaaacggcgcgcttcgacacaccggaatgtgtgcagcttttagaaaatatgtacgattttgcgtttgcgccggacagcaactacacgacttcgggttcggacaatttcagcgattattttgcggtgtataacagcgtgccgagcccgtctctcgcgttcccggtggggtacccgaaagagacggtgaacgacccaaaaccgtttgcactcgaaaatggcgacgtgttattggaaaaattctgcacgcttgcgatcccgacggaaagtaaaaacgctgaaaacgcgtggacgtatatcgattttgtaacgggcgacctcacggagtatatcgataacgtcacggcgtggtcgtatagcatcaatcgcgcctatgaccgcaatttgacggtattgatgctgcagcggcagtttaatttcacagaggaagaagccgagagcgcgctcgaaaactttgatgcgattatggaaaaatataatgcaatcccgacgatcgatgaccgcttgtatgcgcccttgtacgaaacggtgaatgcgtacctaacagcggacaaagcgcccgcggaggaaacggcggcgaaattacaggcgagtgcagagcagtattttgcggagtgacacagcccgaaaggggagagaacatgaagaagaatcgaaaaatctactggttgtttttggcgccgagtttgctcggtgttgcggtgttttactgcgttccgtttctctatgcggcgtattatgcggtgatcgacaacatcggctccgggcaatttgtggggctgcaaaattttatcgacgtgctgcaaaacgagcttttccgcacggcggcgaaaaatacgctgatcttcatggcgctgacggtgccgctcggcatggctttggcgcttttgacggcgctttgcttgcggaagatcagccgcgggcggcagcttttatcgctgtgcctattattaccgcttgtggtgccgagcggcacgggcgcgtatttttggaagatcttattcgaccaaaacgggcttttgatccgcacgctggtgctgttcggcgtgccgcatgaatcgctgatacaattaaacgggcgcatggcgattttggtattcgtgtttttgtggaagaccgtgagttacaacacaattctgttctggtcgggactcaactggatcccgaagacgtattacgagcagatggctctggagggcggcggacacttggcacagtttcggcaggtgacgtggatataccttgcgccgacgacgttcgtggtgtttttgatgtcggtcgtcaacgcgtttaaggtgttcaaagaaatttacatgctgttcggcgcgtacccgggaccggatatttacatgctccagcactacatgaacaatctgttcgcggcgctcaacctgccgcggctttcgagcattgcgtacattctattcgtgtgcatcggcgcagtgctgctcgtggtgttccgtttgcaaaagcgcgtttcggacgcgctggaatagggggcgagcatgaaaaaatattctattccttcctacatatttttggctttactcgcaggtgtagcgatatttccggtgctgtttgtcatttccaactcatttatgagcagtgcggagatcatcagtcggtattcggcggagattttgcccgcaaacgaagcggatttcgcttcgcgcggtgtgcattttgtgcgtgtgggacttctccccgaacggttcgatttagggcagtaccgcgagctgtttttgaaaagtccggggtacctgagaatgttctggaattccgttgcaatcgtgatcccggttttgcttgggcaaacgattttggcgccgctgacggcgtatggttttgagcgtgtcatgtggaagcacaaggaagcactgtttcttgtgtacatcgtcatcatgctgatgccggcgcagcttttgcttgtgccgaacttcgtggtggcgggttggctgcatattcgggacaatgtgctcgcgattatattaccggcggtgtttcacccgcttggcgtggtgctcattcggcagcagttgaaaaattttccgacctcctgcatagaagctgcagcgctggacggcgcgggggcgtaccaaacgtacagactgatcgtgcggccaaatttgtcctcggtcgtggcggcgttgaccgttttgctctttgcggataactggaatatcgtcgaccaagcggtggtgtttattcgcaaaacgtatgaaaacccgctttccgtgtaccttgcgaacgtggtgtcggaagcgccgggcatattctttgcggtctccgtgttttatcttataccggcgctgctggtgtttttcctcgggcaggatcatttgatcgagggcgttgtgctctctgagctgaaagtgtaggtgcaaaatgaagcgaaaagtgaagctgcgcgtgaaaatcttttgcgcgctcggcgcggtatattttctgtttgtgctgtgcatgacggtctacgcacagaccacgcacataaacgcattacctaccgtaacgctgatgcgtgtggaagacggcgttgtgccgcgcgaagccgtttatggtaatcggcagagaggctaccgcgtttacaccgtaaagcaggaggacggcgcgttcggcaaggcgtattttttgcatgttgtggaatcggaaaagatcttttcgaccgagcaggaaggcaaagtgctcatcggtgcattgcgccgagaaacgaaccccgtggcgtttgagatacatttatctgaaaatgaaatgccgtatgagggcatggaggtgaaaatcgtggggtagaagtggcaattatagataattatataagtaaaaatgaagttgcaaatctaattggtaaagatataaccgtcatagatgctcatgggaattcaatcaaagaatataagtgggctgaaatgacccacggaacagtgtgtgcatctattttggcagaaaaatttgaagatgcaaatgttacagcagtttctttaggggactcacatatggaaatctctttagaagaggtatgctcagcatttcagttatttgaaaaaagtaattttaaatgtatttgtttgagtataggaattcataattggattcatctacacgcattatataatataacacaaagaatagtttctgatgggatccagattataagttctggatcaaatgatgaaaaaataacttttcctgctgcgtatccgtgggtgcttggtgtaaagtacatgccttatataagtggaattaagagaatttataaatctgaagatggatgtgatatagctacaggattttttaaatcacaagtgttagaaaaactaagtattagaaattcttttttatacttccgacgatgctcttcccgtgctcttgggcgctcgggtgcaaattgatgttggcaggttcggcagagatacttctgatacccatcgggatctttgccgtaacgataaaatgaatgatttttgttgcattttggacactaaatgtggtatgatttcatcatgagaaccctcttttttgggagatatgtgttttgtggtgaaaccaatataccagagggtctgagtggttctcaattttcattttagtttacaatacgatcggtgcggacgggaggtataatcatgtttcgtttagcactttgcggaaaaaactacgaactattggaaaaaattaaatctcatattcaaagctttgtagaaacatataaaaatgaaaccaagtgtatttcgattgaacagtataagcaattagcatcgcttcgtgatgatatggtagatggaattcacttcgatattcttatggtcgaaattgatgcgcatccacatgaagattttcgtttactttcggaaatacgaaaaaccgctacggacactatcgtcattctcttttcaaagtttctcgactacgattttactcggctggggtatcaggtaggcgcatttcggtatctatccacacacaatttgttttcggatctgccggaagcactttgcactgcactggaaatttcctctaaaaagcaaagaggatactacacgttttctcattattcggaaattatccgaattccgttagatgatgtcttatacgtaaagcgagttaatcgtataaccatgatcaaagcaaagaacggcaattttcatcttcaattaccgttaaaagagatttataaagaaataaatgacagtagatttttatttatagacagaagctgctttgtaaatatagatcatgtgacttgctttgctgatgcagaagttaagttggataatcaagagagcctaccgatcagtcactcaaactttactgccattagaagcgtattactatataaaacacctaatgaaatacaacaacccgtaagataacttcttatttcatattccatataaaaccgcccgctatgtatctaattttgatacatgagcaggcggtttttatttttacggcatcggaagaaccatacgcacgcattttttcactgggtacaagctgacatttaggtacataacgatttgttcttttccggcttgttcctcaaggtaagtcacgccatctgcacggccggatgttgggtagaccatataaagagaagcttccgttccgggcatcacagagatgccatctgcttttgagttaagatccgggtttgcgattttcatatagatttcactcttattgaagtaagcggactgcgcttcattcaaaaggttaaaatcgcggataaaaacgccgccgtccgtattggtttcatttttgaaatctacggtcaacagaactacgtcatgctgtgtgttttctgcaagataatcgacaggcttgccgaatcgctgcataaaatcttcgtaacgcaccacttccgcttcgcgaacacgaacagaatacccattggtattttcttcttttgagtagaaaaaatcaccgtttaggggaatccattcgccgatgccgtattcctgcgtttcaaatgaataggctgttgcattaacgtaccagatgcgccatgcacaaagcaccaatgcaacggacaaaagaatgaccgaaagcgttttactcactcttatcttgcgtttcatacggcgttacacgtccttcccgtacaaggtaaatttcatcggacagctcacgcagaacagaaaaatcatggcaagccagaataaccaatgcgccccgctgtttttgctcaagaagcagatctctcaccatttctatgccgtctgtatccagtgcgtttgtcggctcatcaatcagaagcagcgcaggatattccaaaattgctccggcaatgcctaatctctgcttcatgccgagtgaaaactgcttgtattttcgcggatcatccgcgccgagtccgacctgctccaacacttcgcggatacgttcctccccgacttttcggtgaatatttgcaatcagctttaagttctgtgccgccgtataatgatcgataaatgccgggttttcaatcagcataccaatgtccggcggaaaagaaatatcctttccaagtaccttaccatcaatcgtgatcgtgccctccgtcgggcggatcagcccggcgattagccgcataagcatagttttaccggagccgttcacaccgcgcagaccgtagatcgtaccgcttgtaagggtgagcgagacgtcttcaatgacggtaatattcttgatcgtttttgtaacatgatttactacgatttccatataggcttactccttttcatgactacgataggtctgagccgagaatgtctcgatattggaacacaaaataccctataccgatactaagcacagcgagccatattcccaataatataccgaacggcatggtcagaccggttgacacaagcagtgcgtttcttgcgcccatggcatagttaccaaaaaacaccgggctttgaatataggcgcctgcgaataaatagccggcaagcacgaagtagctttgcactggtttcaaaacgagcgataaaatcagctgcaccaatgcgagtacgatcatagtaaagccggtcattaaaaataccggccaaatattccaagtggtactgcttgttaaatcgtctgctttcatgtaaagctctctcgaaatataccaatttgcctgcatactcggctttgcaccaaagcataatccggcaatcgtgctggctgcaaaaacgatcaaatagtttgtaatggtattgatgattgtccaaacacattttgaaagccaccagtttcctctgctgccggagagcaccattagctgtttgcctatgccgtttaattctgcaaacggataatatagagaagtaaattgcatccataagacgaatacgaaccacatcgtcggcattacgaaatcgttttctgcgccggagatcaaattcactttaccgcagccgccaatcaatgccaagaaatagtctgccgttgtaacaggagattccagatattgcggatcggtgagctcaaaaatgcgcagcgtccagaaatgatagatcgaaaggaagaaaaacataataaatgtaacgattaagcgctttttagcacgccctatgccgtagcgcaaatcgtgatccaaaaatttaataaacatctgcgtttttccccctttccaaaacaataacgagcggcagaagaatgagtgaaaccgtcataatcgtatagaccacgatagattgattggacgatgaactggtcatccaaatgtagtttagaacagaggtttcggtaaatgagcggtatacggatgctttttgcaaagatgcgatgatatacagcagtacaagatatggtgcaaaaagaaccacaaatttatttttttcaaagaatgaaagtgcaagcggaatcgttgcccatgcaccggcaaatataccgatcatcagcatattcaggaaagctgtgcataacgggtgagcgtagtagaggtttccgagcagcttagttgcgcttacttgataatataaggcaaagtttatatccgggcgataagccggcacaaggcatgacgcaagcaaaaagctaaaaagcatcggcagcaaaaccgttaaagcccctgaaaggaatgtggagacatattttcctaaaaagtaagaagcttttccaagctgcgatgccataatgcggtcgtatccgttcttttcttccgcaagataagaccagctgtacgggataacgacaaaaaccggcatcgtataaaagaaaaccatcggcagcgtttcattggctcgaccaccgatccatgaattataaagagtgtagatttgcaggaaagggtattcggcaaaagtgccgtctgcctgcaaatttacagttgtaagagtaagctgtaagttgtctttatatgatttataagccaaaatatcatctgctgttacgattaaaagtaaaatcagcagtacaaatagaaatgatttgctgtgaaataaattgtagagctcattttgcagaaagtgcctaagacttttcatgtgggctatcctttcattttgctaaatcacgcagcataacgccgtaaaagatttctctgccgggggtgatggctaagaacggatctttttgcgataaatatacgcggtcgatcaaaaactctattgtgaaattttgcgtttcgcccggctgcaattcaaagctccagtaatcatctccggggccgtgtggatcaaaataggtctcgtatgcagaataataatttccgacggttgtatacccctccgggttgttctgattctcgggaaggagatcttcatatgcgctaagtacaaacatattggcgttgaatttatattttacgccgtttttgttttctgcatcaacattcttaagggataattccacatgcagtatgcacgggtcttcaaattcggacgcataaaactcccagagtgatttattatcatatttgatattgctttctgagtattctttaatttcagcatcggatacgcaaagctccaaatcgccgtcccagccgagccccggtgcatcatctgtttttgcttcgccttgattataataccgactgtgcagcgtatagggttcccctatttctgcaaaagtttttataagcgcatcagcttccggtgaattcacttccgacgaagttgtttcagaagcactttcttttggttcactttctgtcggtgcttcgcttgacgtttctaatggagaattcgagctttcgggttcagcagctgacatagatgatgaattttccgtttccgcttcacttgatcgatccatgataaaataaataaccgatgcaccgaccagtagaatgagaattgcaaccgtgcagattatagcttttttgttcataatattaactcctaaattgagttgatttacaagattatataaaaatctacattcaaatagattcagaattctaagtttatgtaacgtatcgtaaatacggataccaccgttacaacagccatcaacaacgctaacagtctttttggtttcattgagtttgtcaccctttcgctaaaaaatattttttgtctgtggtggccaccactgcttgcaaaatcaagtttcaagttatatatagccgaaacctgaattttttgtctatacaatagcatatagttgacatttgtgccgaaatattgtctgaattgggcaaaaattatgtctgaagatttcactgcactgtatacctacttgtattgcgaaggaacattgctaaattatgtaccagccgcccaaatcaggcggctggtttctacgggttcaagatcccatagccgaggatttcataataccccacgggatattggttctggcggcaggcgtcgccggagttgccctcgatggtgtagacgatgccgttttcgcatttttccacaatgccgacgtgatcggcttcgccgtcctgcggaccggatgcgccgtttgggtcgttccagtcgaagaaaacgatcatgccgggagcgggctcaatcgtgttatccgcccattgcccgtggctgcggaaccattatcaaacagattcacacgctggttttgatggatcgaccggaggaccgcggcgtttatcgacggattcctgttaaaattatgggcgcatatcatacgccgccggagccggttgttgttccggaacagatggaaaagctcgtaaaagagttttcaaagaaaaaactgcacccgattgagagtgcagcgctgtttcatttgaaatttgagggtattcacccctttgtggacggcaacggccgcacagggcgtttgatactgaacctgtttcttatgcagaatggctatccacctatcaatgtgaaatttgcagaccgtaaacggtattatgaagcatttgatagttattatcgtgataacgatgcgggggccatggttcaattgattgccgagtatgtagaagaaaggctaatcaggtatatagaaattacgaattagggaggaatagaaaatacgagcaccattggtaaagccacgctgcagtcagacgaaaacggtttggttacgcttcaatgcgataggtgtaaaagcagattcaaaatggattgaacttatttgaatgatgaactgagcggggatatttgttgccctgtgtgtggaatatcagaagcgttaaatacattttggcctcatgatctacggaggattgccgcagatcgtaagtttccggagcgaacgacagaaagcagaaagtatatcggtgcaaatctgcttgtccgcaaacagcagaaacatatttaacgacaattcttatacagttaacgttcatacagaagcaactgcatacagatttacaattcgtttcgacttaatatcttcgataaaatcaggactttttgagtgttttgcattatcgggatcgcagcgcttttttgcaggtttaaattcggtaagactatgtattttaagtccaaaactcaactgcttgtcctccaaacaaggacatcggagcatttctgtcacgtatgtaggcaccgaagaactcgctcatctcgagatggtggggacaatcgtgtaccagctgacgcggaatttgacgcaggaggagattcaaaagcaaggctttgatgtgtatttcatcgaccacacgacgggcgtttacccggcagcggcatccggcgcgccgttcagtgcggcgagcatcgccgtaacaggcgacacgctggcagacatcaacgaagacctcgccgccgagcagaaggcccgcgtaacgtatgacaacatcctgcgctttgcggatgatcccgatgtacgcgaccccatcaagttcctgcgcgagcgcgagattgtgcattaccagcgcttcggtgagggtttgcgcatcgcgactgaccgactcgattccaaaaacttctacgcgtttaacccctcgttcgattaaacaaaaacgggcggcactttttcggtgcttgcccgtttttcctatggctttacggcgaatttgtgacttttttgacgattttgacgcagggttaggaggcaaaataccctgaattttcctgcgaatgcgacaaattcacgggggttcgggcgcaaatttttccgtactgttacaaagatttaatgaaacggcgaactttacggtaaaacactggcgattttctgcacagtgtggtatactaactctgtttaatgcgaaaaagtgcggctttccgcaacggaaaaatttggcagcgtgtgtttggggtgcgggcaaaggctgcacgctatgcgtaaaaatggaacggcgctgcacagaaaggggcgaagcctctgtgaaaaaaagaatactgctcgggctgatctccgttttcaaagcgctgtataacgccgtgtatgccgtcatgaagctgcgccccatgcagaaaaaagtcgtcatgatcagccgccagtcgaacagccagcggccggattttgaacagctcggcgcagagattgaagcgcgtgatccaggagtgcgccttgtgtatctctgccgcgaaatgggcgatacgccgttagagctcctgcgctattgtttccatttgctgcactgcgccgcggagctttccaccgcgcatgtgtgcatcatagacggctactgcatcccggtcagcgtgctgcatcaccgtaaagagctgcgcgtggtgcaggtctggcacgcgcttggcgccattaagaagtttggcaggcaggcgctttccgtgcccggcgggcgcgataaagagcttgcggagcgcatggggatgcataagcactacgatgccgtgctctgtgcgagtcaccgtacagcaaaagcctatgaggaggcgttcggcgtttctgccgataaaatgcgcgtgaccggcgtgccgcgtgtagacgccattttgaaaatgaatcgcgcgcgttgccgccgccgttttttcgcggcctacccggagctgcgcgagcagaagatcgtcctatacgctcccacgttccgagacggcgagcaaatgcctgagattgagccgctcatcacggcggcggaaaaaatgggtatgctgctcatcgtgcggctgcacccactcgaccgcgagcgcttggagcgccgccgtgtgctgccgaagttccgcgagtgcccggagttcggcaccttcacgctaatggcagtagcagacgccgtcatcacggactattccgctatttccattgaggcgagcctcatcaaaaagccggtgtatttctacgtttacgatttagaacgctacaaggaaacgcgcggcctcaactttgacccgcttgcagagatgccgcactgcgcattcacaaaagccgagcctctggtcgactgtattctccacacgccctacgattacgaaaagctcaccgccttcagaaaagaattcgtggagacggatgacgcgaacaacacgcagcgctgtgtggatcttataatgactttccttacagaagggataaaggatagataaaatgaagtcagaatgtaattttgattcgataaaagtcagcgttatcgttcctgtatacaacgttgaagcgtatttggagcgttgccttgattccttagtgaagcaaacgctggaagaaatggagatcattgttgtcaacgacggcacaaaggataattcgcaggcgatcatagaccgctatgccgcagcatatccgcagaaggtgataagcctcatcaaagaaaacggcggactatccgatgcgcgcaactacggtattccgtatgcgcacggtgaatacatcggctttgtggacagcgatgactatttaaacgtgactatgtaccaaaagctgtacgaccgcgccgctgaaacggattcggacattgtggtttgcggctattacggtatagacgaaaataccgaaacgcggcgctttttccagcgcggcagcacgctggagttcggtgtgagcctgcacgaaaacccgaagcttctgtacacaaatgcaccgtatgcctggaataaaatttaccgccgcgccttatttgagcgcacggggatacgcttcccgaaagggaaaatttatgaggacattgcgaccatctatccgctgatgctgcatgccaaccgaatctccaaagtaaacgagccgctgtactattatattctaaagcgcgaaggcgcaatcacggcgacattctccgagaacatcctgcagatgtatgattcgctcgcaatcatgaacgaatactatattcgggaaggcgcattcgaggagtttaaagaggtgctcggcttcatcaatttgaagcacacgatcctgcgcttccgcgattttacggcgtataaagataaagacctgcagtttaaagtcgtccgtaagggctttcagcatctggatcactattttgatgactggcgcagaaacaaggtgttttttgactttttcttctccaaaaaacggctgatgggcgctttggccaagcacgagttcacgtggtatctttacagcatgatgccgaattccgtgctgcgccttttgggcaaagcggcaaaaacgatgcgcaaggctttgacggttttctcaaagcgcagttatttgaataaatactactacgtgcgcacgtgtaaaaagaagccgctttgcgacaagcaggtgctttttgaatcctttcacggtacgaacctaaacgattcgccgttcgcaatgatgcgcgagctggcaaaggacccgacgtttaccatctattacacgtcgaaaaaagagctgatgggcgagcaccggaagatattagatgcgtatggtctgaaccgtgtgcagcttatcccgctcggctcgagaaaataccagaagattttggcaacgagccgataccttgtaaataacgtgagcttcccaacgtattttatccgccgtgaagggcaggtctatttgaatacatggcacggaacgccgctgaagaccctcggcaaaaaaatggcgatgggcattcaggatatgagcaacatgcagcgcaatttcctgcacagcagctatctgctgcacccgaaccgctatacgatggatcacatgatggaagattacaacctgaaccacctctatacgggaaaggtgatcctgagcgggtacccgcgcaacgcgatattctgggataaagacgcggcagcggcggtgcggaagcaatacggaatggacggcaaggaaacctttgcctacatgccgacttggcgcggcgcgatgagctccggcgcaaacaagggcgggtacgaagcggaagtccgcgacctgctgacaaagttcgacagcgcgctgacggataagcagatcatgtacgtgaacctgcatccgcttgtaaaagacaaagtgccgatcgaaggctataagcacattgtaaaattcccggatgacgtggacagttacagctttttgaatgctgtggacgtgctgattacggactattccagcgttttcttcgatttttccatcacgcgcaagccaatcgtgctctttatgtacgactatgatgcgtacatggcagagcgtggcatgtatatggacgtgcgcgacctcccgttccgcaaaatttataccatgaacgaaatgctcgcatacctgcacgaaaacgataaacaggcagacgtgaacagtgcagcgtatgacgcgtattataagatgtttacaaattacgatgcgccggataatatccagaacctgaacgacatgctgttctacggaaaagcgccgaagtttgaagtgatcgattatgccgaaaacaaaaagcggccgcgaaatgtttatcttgtcggaaagaacgaccataagggttgggcaaaagagctggaacagcagctctgttccatggaagcgcccatagcggttttcctgcgtagggatttcaacgagctcaccctcaaggagctgaccgataaatataacaattggctggattacaccgtgatcgatacgcagatgttcctttctttgccggaaaacatcaagctgtttttcagcagagagcgtaataagtataattgcgatgctgttttcgcgcgggaagtattccgtattttgccgcatctgaatattcaaagtgtaacggcaggcgatgactcttacagaaaccggagcattgagcaagctgtaaaaaacgaaaggaaaggctaaaacatgaaacgagtattgacctacggaacgtttgacctgctgcattacggccacatcaaccttttaaagcgcgcaaaggcactgggcgattatcttatcgtggcgctttccacggatgagttcaacgccggcaagggcaaaaaagcgtttcacgattatgaaacgcgcaaaatgatgctcgaagccattcgctacgttgacctcgtcattccggaggaaagctgggatcaaaaaatcagcgacgtgaaggactaccatgtggacgtagtcgttatgggtagtgactgggaaaacagcgatcgctttgactacctcaaggattactgcgagctcgtcttcctgccgcgcacgccgggcatctccaccacgaaaatcaagcacgacctcggccttgtaaacgaaaacgaaaatgccgaagcgctcatgaaccactgattatacgctttcgcgaaaagttatttataaaatagcagatataaaacacgctcccgctgcagatactttaaaaaagtaggcaggggagcgtgaatttttttgagaaaagttggagcaaaaggtttttatcgccgttacagttcgctctgtgttacgccgtcaaatcgacatactcgcctttgacgaagcccaaaagctgatccgggtttacgatgagctgcacgccgcgcataccgccgctgacggcgattgcatcaaacagcatggcggtctcgtcgatatacgtcgggaactccttcttcatgcccacgggcgagcagccgccgcggatatagccggtcgtcggcagcaagtctttcacgtgcagaagctccacggatttatttttgctggctctggcagcttttttgaggtctaattcctccgctacggggatgcaaaacacgacaaacccggtcttatcgccgcgcgcaacgagcgttttgaacaccgtctcatacggcatgcccacggcgtctgccgcgtgtacgcccgcgagatcggtctcctcaaattcatatgtgcgcacctcatagggaatcttcgcgctgtccagcatgcgcatggcgttcgtcttttttacgccggagctcatgcttcaccgagctccttcaagatcatgtcggccgcctgctttgcgcacttgcggtagccttcctcggtcaggtgcagcatatccgggcacttataatagtgctcgccttccttgcacagcgcgtaaaggtcgttcaccgggatgttttcctctgccatcagctttttggcggcatcgttatacagctccacccactcgttattgtagttgatgctgtccgcctgcgtgccggtgttgtctgccgccatgccgggctccaaaatcggcgtggtggtcgcgaagatgatcttcgcgccgttttctctgcacagcttgatgatgcgctttaagaagtgcacatattcctcaacggggtgcatggcctctgtcatcggagcctcaatgttcatatcccagtagccgttgttccagtgtaccacgtcaaaatgaccgtgatgcttgaacatctggttcgcctgccacagcgtgtacgcagcgaagcggccgttgtcctcggcgtcgtaaacgacctcacacttgccgtttaactcttcttttacataatcgtcatagcccatgcgaatggaatcgccgagcaaaagcacttttttcattctgaaaacctcttttcgggtagatttgccaatagaattatactgccaaaaccgtgaaaattcaagatgctttcggcagtatacaaaagggcgttgcgtttttctgaaaaacgtggtatactctgcttgtttttctaaaaggatcgaaaaaggggctgtgaaaaatgggcagatacgatgaaattttggcgcgttttatggcatttccgagcatgagccgcgcattttgatgggcgtgcaggtcggttccggcgtgcggaaagaccgcccggcagatgcctacacgacgcagtggatgcagaacgcatttgaaaattaaacccgccaaacacagcaaaacggcaccgatgaaatcaatcaccggtgccgttcatttttaggttaggggaaaagcggacttacttcttttcctgaatgtacttgtcgattgcagctgcggcggtcttgcctgcgcccatggcgaggataaccgttgcggcgcccgttacggcgtcgccgcctgcgtacacaccctcgatggaggtgaggccgtgttcgtccgcgatgatctggccgcgcttctgggtctcaagacccggggtggtggctttcagcagcgggttcggggaagtgccgagggacatgataacgcaatccatcggaatatcgaattcgctgccctcaatgacgatcgggctgcgtctgccggaagcatccggctcgccaagctccatttttacgcagcgaataccggcgacccagccgtagttcgggtcacgcgggtcggagacgttcgtcggcaaaatctctaccgggttcgtcagcgtatggaagatgatgccctcttcctctgcgtgctccacttcttccttacgtgccggcagttctgccatgccgcggcggtagatgatgtacacgttctccgcgccgagacgctttgcggttctcgcggcgtccatggccacgttaccgccgccgacgaccgccacgtttttcgcgtgctggatcggcgtagtggaatcatcgcggtaagccttcatcaggttgctgcgggtgaggaattcgtttgcggagtacacacccttcaggttctcgcccgggatgttcataaagcggggaagacctgcacccgtgccgacaaacacggcctcgtagccgtactcgtccttcagctcttcaatcgtcaggatacgaccgataaccatattggtctccaccttgacgccgagcgccttgaggttatcgacttccttctgcacgatggacttcggcagacggaactccgggatgccgtacacgagcacgccgcctgcaaggtgcagcgcttcgtaaatcgtcacgtcgtagcccagctttgcgaggtcgcccgcgcaggtaagacccgcagggccggaaccgataacggcaaccttgtggccgttcttcggcgcggtgatgctggcaacggtagcgtgtgcgttgtgccagtcggcaacaaaacgctccagacggccgatgccgaccggttcgcccttaatgccgcgcacgcacttgccttcgcactgcgtctcctgcggacagacacggccgcagacagccggcagggaagaggactgcgcaataacctgatatgcgccctcaaagtcgtgctcggcgactttcttgatgaattccggaatatgaatattgaccgggcagccggaaacgcacggcatgttcttacaattcaggcagcgctgtgcttcatccagtgccatttcttcggtatagcccagtgtgacctctttaaagttcttgttgcgaacgttcgggtcctgcgagggcatggggttctttgtcattctcatgttaggcatgatcactcaacctccttcttgaacaggttgcaggcttcctcataagcgtggcgctcaaaagaagtgtagctgcgggagcggctcatcgcctcgtcaaaatcgacctcgtggccgtcaaaatccgggccgtctacgcaggcaaacttcgttttgccgccaacggtcaggcggcagccgccgcacatgcccgtgccgtctaccatgatcggattcatggaaacaacggtcttctggtcgtattcttttgtggtgaggcagacgaacttcatcatgatcagcgggccgatggcgatgacctcgtcaaaacgctcgccgttttcaagcagcgtcttcagcggggcggtgacattgcccttttcgccgtaggagccgtcgtccgtcatcagcgtgaagtggtcggagcaagccttgaattcgtcttccagaatcacgagatcctgattgcggaaaccgatgatagaggtgacttccgcgcccatggcgtgcagctcttcggcaatgggcagtgcgatggcgcagcctacgccgccgccgataacgcagaccttcttaaggccgtctacatgcgttggtacgccgagcgggcctacgaagtcgtgcagacattcaccttcgtttaagtggttgagcttttcggtcgttgcaccgacaatctgaaaaatgattgtaacggtgcccttttcgcgatcatagccggcaacggtcagcgggatacgctcgccgttttcgtctacgcgcagaatgataaactggccgggctttgcttttttcgcaatgagcggcgcctcgatctccatccgcgtcaccgtggggttcagcggctgttttttaacgatcttatacatacttcaaaacctttcccttcaggcatgtgcgcagtttgtgcgattttgcctaagttttgtctgtgtcggatgccggttttgcaatttttgcctttaaaacctgcaaacgatactattataacagagaaatatcaaaattacaacgggaaaagacaggaaatccctgccgtgcggcgatttccgaagaaataccgggcggcagggataggatgtccttttaccggacagatgcccgggatgcgttatagattgtctttatagacttagaagtcaacttccgtgtcgtagtagcagcacttaagcagcttttccatctcttcctggctgggctgacgcgggttggaaccggtgcaggcatcggcgatagcgttctttgcaatctccggcagtctctcaaggaagacgttctccggcacaaagccgttctcggtcgggaagctgtccgggccgtagtgcttgatgcagtgcggaatgttcagctcgtcgttcatgttgcgcaggtattggatgagcagctgtaccttctcgtcgtcgttgttgccaccgaggtgcatgtagtcggtgatgacaccgtaacgcttctttgcggtctcgtcctttgcgttgaacgcgatgaccttcggcaggtacatagcgtttgcggcgccgtggatgatgtgtgcgccgtaatcggcaaacgcagcgccggtcttgtgtgccatggagtgtacgatgccgagcagagcgttggagaacgccataccggccagacactgtgcgttgtgcatgttgtcgcgggcggtcatatcgccgttataggacgggataaggtccttcatgatcatctcgattgcgtggatggcgagcgggtcggtgaaatcgcagtttgcggtggaaacatacgcttcaatcgcatgggtcatagcatccataccggtgtgcgcaacgagcttcttcggcatcgtctcggcaaggtccgggtcaacgatggcgacatccggggtaatctcgaagtcggcgatcgggtacttgatgcccttctgataatcggtgatgatggagaacgcggtcacttccgttgcggtgccggaagtagaggaaatggcgcagaagtgtgccttctggcgcagcttcggcaggccgaagaccttgcacatatcctcaaacgtgacgtccgggtattcatatttgatccacatagcttttgcggcatcgatcggagagccgccgcccatcgcgatgatccaatccggctggaactcgatcatcttctgcgcacccttcataacggtctcaacagacgggtcagactcaatgccttcaatcagctcgacctccatgccggcttccttcagatagctgactgcacggtccaaaaagccgaaacgcttcatggagccgccgcctacacaaacaacagcctttttgccttcaaaatgcttcagttcttccaaagcacccttgccatgatacaaatcgcggggaagtgtaaatcttgccataagtctatcgtcctttctatgtgaagcaatttatcgcaaagctcggtggtttgcac

SEQ ID NO: 4509 - DNA, 4964 bp, Unknown
  16S sequences of unknown bacteria
ctacgcttgtaggggcgaccattggtcgcccgctccgaaggcaacccgcaaacttccatccttacccgccatcaaacaattttattcgtcaaaatacacaattcaaaaaggaatccaaaatgttagactcaaccttcagtctcctgtacccgaacggcgaggaaccggcgggagaaaaagtaaacatctccgacgaggtgatctcggagctcgggctcgacttcttaatcgacctcaagagctcgaacctcgcggactatttcacgaccgacaaggcgacaatcgagtaccgtcaggcggttctgaacgatatgctcgagaacccgacaatcgtcgataccctgaaaagcgtcttcaaattgctcaatgacattgtcgagctgcgccgcataaaatccgagacagaggtcgcgaagaactacctctacagtatcaccgaaatcgaactctacatagacatagtctcgaagctctcaaagggcttccagtcggtgaagggcaacgtgaaatccgacgcgttcagaagaatgaccgacaccgtctccgaactcgcggaaagtgactactaccgcgacctgaaccgcaagctcggcgagctgacctcgaaagttcacgacgtcaagtcgataactatcggcgtcaacctcgacggcgagttccgcccggtcgacgcgggagtggtcagcctgaacgcggagagcttcaagtccggcaaggtcatcgacaagatactgagaatggacttcaaggacgacgactacacctgcatagcccctctcgtcccctacacccgctcgaacaccgacaacgcgaagatagccttcacgaacgcgttcaacaacgcgatgaacgacatcttcaaggcggacgtgcggcagtggagacagctcgttcagtcctacgtgctgtcgaacaccgacttcctgcttaaaatcatgccggagatagagttcctgacgaaggcgcagcatctgctgctcgcgctccgctcgaggggaatgagcctcgccgcgcctgagatagcgccgatggacgaccgcagattcacggcgttcgggctgtataatccgtgcgtcgcgctgaaggtcgaccagaagatggtgctgaacgacatagatttcgacgacaaggcgaagatctacgtcctgaccggaccgaaccgcggcggaaagtcggtcatcacctgcgctgtcgggcaggcacaggcgctctgccagttagggctcccggtcccggcggcgagcgtggttatatcccctgtgacggcgatctacacgcatttcccgaccggaagcgagggggacggcgcgatagagaagggaagactcggagaagagtgcgaccgcctcaacaaaatcttcgacacgcttgacagccacagcctgatacttctcgacgagtcgttcagctcgacggggtcgtacgaggcgtcgtacatcgcgtcggaggtgctgaccgggttctcgatgataggctgcaagtgcctgttctcgacccacctgcacgagctgtcgggtcagctcgacgagataaacaagaagtgcgcggcgatgggcggagtgccgatagacacgctcgtcgcgggcatccacggaagcgagcgcagcttcgagataacgagagccaagccggacggaaagagctacgcgagggacatcgcggagaagttcggtctgtcgtacgaccggataatggagcgcgcgaagaggaacgccgggagataaggcgcggagacgcgtgcaatcatacgcgtaaggatattgtaagcggaaacgatgaaggcgggcgaccaatggtcgcccctacagaggtagtacgaaatccgttcgttatgccttaatccgccgaattatcattccgtcaaaatcaccaaacaacatagggacgaggcacaatcccgtaggggcgaccattggtcgcccgctcaatcgtccccccatcaaaccaccaaaaaaggagaaaaaaccatgaaatccgacaaaaaaaccgaaatggaatttctgacccttctcgagaacgacgcccgcctgaccccggagcagctcgccgtcatgctcgacaaggacgtcggcgacataaagcgccagctgtccctctacgaaaaggacggcgtcatcctcggctacaagaccctcgtcgactgggacaagaccgaccgcgagtacgtcaccgcgctgatcgagctgaaggtcgccccgcagcgcgaccgcgggttcgacaaagtcgcggagaaaatctacaacttcccggaggtcaagtcgctctacctgatgagcggcagcttcgacctcgccgtcttcatcgaggggcggacgatgaaggaagtcgcgtacttcgtcgccggaaagctcgcgccgctcgaatatatagtcgcgaccgcgacgcatttcgtgctcagaaaatacaaggacaagggcgtcgtctacggaccctgcgaaaaagacgagagagggacgctataattcatgcttgactacgcaaagatactttcggggaaggtgcaggagataaagccctccggcatacgcaaattcttcgacctgctcggcgaccgcaaggatgtcatatccctgaccgtcggcgagcccgacttcatgaccccctaccacatccgcgaggcgggaatcgaaagcctcgaaaagggaagaaccttctacacctcgaacaacggaattctcgagctcaggcgcgaaatctgcaactacctgaaccgccgcttcgggctcgactacgagccgaaaagcgaagtcatcgtgaccgtcggcggaagcgaagccatcgacctcaccgtacgcgcgctgatcgaaccgggcgacgaagcgataatccccgtcccgtccttcgtctgctacggccccatagtcgaactcgcgcacggcaagcccgtcttcatagagacgaaagaagaagacaacttcaaactccgcccggaggcactgagagccgcgataaccccgaaaaccaaactcctcatcctcccgtacccgaacaaccccaccggagccgtaatgacaaaggatgaactcgaagaaatcgcgcaaatcctcgaaggcacgaacatcatggtcctctccgacgaaatctacggcgaactcacctacggacgccgccacaccgccttcgccacggtcggaaacatgtgggaacgcacaataaccgtctccggcttctccaaagcctacgcgatgaccggctggcgtctcggctacctctgcgcgccgaaggaactcgtcacacaaatgcacaaaatccaccaatacgccataatgtgcgcccccacaacaagccagctcgccgccatagaagccctgaagcacggcgaccccgatatagaaatgatggcaaacgaatacaaccgccgccgcaaatacatcctcgacggcctcagaaaaatgggcatcgacaccttcgaagccgaaggcgccttctacgtcttcccgagaatcggcaaattcggtctctcaagcgacgatttctgccagaaactcctcgacgaaaaaggcgtcgcgatagtccccggcaacgccttcggagactgcggagagggctacgcgagaatctcatacgcgtactcagtggaacatatcacggaagcgctcaagagaatgaacgaattcatacaggagcttttttgaaaaaaagctccgcaaaaaactttatagtcaaggtttcggtgtgcgtcggatgaagattctgccacatcaaacatagtgcgtcgaaaaagttgtgcaaaatcacaagacattgcacgacgcttgtaggggcgaccattggtcgcccgctccgcaacaatgcggaaaaacaaaaaaattatgcgacaagaatacgatttttccactgctcaaaaaaatccatacgtcaagaggtcacacaccatgaacttcaaaaaactccaagccttctgcgacgaaatgtccgcgaaccacacgcccggctgctcgctccgcgtctatgaaaagggctcgccggtattctcatacgactgcggcgtctcctcactcgagaccggaaaaaaaatgcggggcgacgaattcttctggatctactcctgctcaaaggtagccaccgtcaccggcgcgctcaaactcgtcgaagacggaatcatcctcataaacgaccccgtttacgaatacatccccgaatggcgcgacgtcaaagtaaaacgcccggacggcacactctccaccccggcgtcccccgtgacggtcggcgacctcttctcaatgaccgcggggatggactacaatttcggctctgaggcgataaagcgggtaaaagccgcgaccggcgggaaatgccccacagaggagatgacgcgggagttcgcgtccgagccgctgtggttcgacccggggacgaagtggcagtattcgctctgccatgacgttctggcggggcttgtcgggatagtttcggggatgccgttccgggattatatgcgggagagggttttcctgccgctcgggatggaggacacgtattatcacgccgacgacaggatactttcgcggatggctgagcagtacacgttcgtcgcggacggctcggggattgtcaccgacacgaccgaggcgcagataaagggcacagacgcgaagagcgggcatttcgtgaacgtcgggaaggacaacccggacattctcggcgacgaatacgactccggcggagccggcatcgtcacgaccgcggacgactacgcgaagctctgcggcgcgctggcgaacggcggcaggaacgcgggcggcgagcggataatcagcgaggcttcgataaagctcatgaccacgaatcgtctgagcgaggaaatcaggcgccgcgacttcaactggttcgcgctgcgcggctacggctacggtctcggcgtgcgcgtgaacataaacccggcggaatccggcagcgtctcgccggtgggcgaattcggctggggcggcgccgccggagcgtcggtggtctgcgacacggaa

SEQ ID NO: 4510 - DNA, 3255 bp, Unknown
  16S sequences of unknown bacteria
tcagctttcatctggacgatcaggtttgccagcttctgttcacattcctctttgctgtgggcgtagacattccgggcgaggcgaccgccgttggggagccgaggggagtatcgtccttcccgcaggttctcattgatctggctgatgcatccggtgcctggtttgcggcgctgacctttgtagggctggaaggtggagggagtcggtttccttggcactgtgtccatgtcttgggtggtttctgatttagcgatccctcggtcgatcttcgccgctgcggttttgcgcatttcgtccgtgacatgggcatagacattcaaagtcgttgcagtggaaacatggccgatgatggtggagagagtcttgatgtccatgccgtgctccagagatgcggttgcgaaggtgtggcggatatcatgaaatctgatgtcaggcagtcctgtttctttcagcaacgcctttaggcggctgtatgctgtgctgggggaaataggctgctccggatcaaagggattggagaaaatccattcggccagcgcagttttctttcgctcccgcaggagctgcgctgtgctgggcggcaggacaatttttctcgttcccgcataggtttttgtgtcatctgtggtaagcggcttgccttttcctttgtgaagggtgcgccgcacatggagcgttccctgttttgcgtcaaaatcttcccaccgcagcgcacagatctcgccccggcgcaggccagtcgttacagcagtgtagaagaaatcgtgccagaattcatcctttccgatgacggacataaaagtgtccagctgtgcttcggtcaggatcttcatgggagcgccgtcaactttaggtgggtcaacttctgcggcagggttactggggatcaggttctgctccattgctgttttcagagcgcggtgcagagtggtgtggatgccgtggaccgttctggcggaaaggccgggggattgtccgtctctgggacatacccgcccggtttcctgcaaggtgcggtagagcgaccgcaggtcggcggcagtgatttttgagagcgctttgtttccaagatggggtttgacgtggagttctagagagcggcggtagccctttagagtcaaggggcgaagtgtggcggccatgtactcgtccagccatttgtccagccagacggatagggacatattgctttcttcggtcaggtcaacgcctttgtaggcttcggtgagttgccgcagctttgcagacagtcctttttgagttggcgcggagatgtaccggaagatggaatcaccgttgtccttgtgaccgactacgatgcgaccttcccagcgaccatcatctcgcttgcgtaccatgccgttaccagacggtctgcgctttgccattgctgtgttcacctcctgggtggggattattcttcgttggttgtgtcgttttcgtcttgagcctgcgctctgccgcaggctcgttcttcttcctccttggcgaaggagtacatcgattccgccgccagttctctatggatgctgcaggcgaggcggtatccgcaagtgaaactgtggagagtcgcaacgctttgtaggttatcctccagatccaccagccgcaacaggagtttccgatcctcctttgccagtcgggaagaggggcctttgtgggtgcgattgacttcgtcgttcaggtcccgaatcgactgagggatggtttcgaactgccgttgcagtgctttcatgtagtcgtacatactgcttacctcgcctgcgggaagcggtgcggctccgccacgcactggtacaggatggcaccgcagttgccacagatcaggaacttgatgcgggtgtccagcaggccgttccgcttgaaggtcaccagcgcgtcaccttgccagccgacccggatatctttgccgccgcagaaccggcactgttccactggaagttgattcatcatagccgttcctccattcgtgttttttgcaaacacacaataccggaagaacagccgaatagccaatgaaagaagtatcgacacagaaaattctacgaaactaacaatgctgttttctggcttgctaggagaaaatttttattgtctacagcggcccaaaataataccttgcctgcggaactttacgaacaggattttacatactcatgccgcccatgccgccgaaaccaaatccgtgatactgctggtactccatatcctgttcttcctccagatcttcttcgggttcctcatcgtaggcggcgtagggatcatccacgatctcctgctgagtgttgctctcatccatgtcagggtattcgtagtcatcctcctgttcctgccgctgctttcgttccgtgcggagcaggtctcccagcagcaggctggcatagtagagttccttggcgggggcatactttttcttctgctgctcgtcatcgtcatccaccacccgcacgactcgctccagcttcttgcccatccgtagcagcattaggatctcacggtcgctgtggtgaacggtctccagatggaaccggtcattgtcacctgtgagcatggcatcgaagatggaggccacaccatacaccgcatcgtccacagtgggaagctggttgccatattcagcggcatccctgcgttgttccagatacgccgcgccgcccatggcgaagtacagttccatgttgccgcggagcagtgtctggtcgaacagtttgttgtcacggcatcggatgttgtccggggtggtgtaggtgatgtatttctgatttggctcccacttcacgccgtagcccatgctttccatctctacaatgaactcctcacgggtgttgctgcattccatggcctgacggatagcgtctttcaactcatccttccattttggaacatagaacggatctgctttcgtttccgtgatggataatccatacttgcggcagagctcattgttgaactccttgaccatgcgcatctctttcgctgactggtggaacttcatgccggtctcgaagttcacggagttcatgatgatgtgattgtgtttgtgctttgtgttcatgtgggtcgccaccagacactggtagcccttgaagtgcgttgcgaactccagcccgatttgatgcaccgtttcaaagtctaccggatcgtcgggagcgaatgcctggacgatgtgatagtaggcgcggccatcagttttgtgaaactgttttttcaccgcttcgaattcatgcaccgcagtcctggccacacagttgacac

SEQ ID NO: 4511 - DNA, 5866 bp, Unknown
  16S sequences of unknown bacteria
tgcgtgtctccacgcaagagccgcgctccaggatgatgggacgatagccgttctgcgccagcagcaatccggcgaacatgccggaagggccgaagccgatcacgaccgggcggtgcgtcaaacgctcgctgccttgctcaggcagcgtgaagggcgccgcttcggccctggcgacatcgcgcagacggcggcgcagcagcgctgcttcatggcgcacctcgcactccagcgtatacgagaacatgatcggatccttgcgggcgtcgatgctttcccgtacgatcgaaaagcggatcagttcatccttgctgatccgcagttttttacaaagcttttcttccagctgatccagatcttcatcgatggtcagcttcacctgtgatactctgagcatacgtcctcctaatacagaaccttcatccaggcaaagcgcctggaaagcaagatgatcgctgcggccagcagctggctggcagcgagcacgagcagatagacgagcagatgatgtccgcccagcaacgagagtaacggcatcgcaaacaggatatgcgatacatagatgagctgcgaggactgccgcagaaactgatgcagcggggcagccggtccgcgcacctgcagcagcgcgcccaccagaaaatagacgaagggcaccatcatcacatacatgctggtcagatcatgcatgttgccgctgagccaggcgatgccctcttccccaagcaggagcagataagagatgcccatgcccagcgcatgctcacgtttgctgcgcactggcgcacgctgcagcagtgcccccagcaagatgaagatcgggccgaagaagatgccgttgcgcgccgtggtgaacacgctgaggtatgccgagacggcattgcccaataccgggatctggcaaaggacatcgccgtacacattgacggcggatccggcgagatacaacagcccgcacacgatgaggctcttcttcatcccgcagttcagatagagcaggtaggcgatgagcgtcgcaagcatcagcgccggcaagaaccacagatgataatagctgccgttgaagacgcagtcaaacagccagcgcaggatcgatgcgccattgtgcagctggatggcggtatacggcagatagatgatcgtccagaccagatacagcgtgccgatgcgccgaagaaaatgcttcaattgcgcaaggttgacctcatcgcgccagccggcctgcacatcgatgcgccggaagaacaaaaaggcgctgacggtgaagaaaaacggcacggcgatgcggcagacggcctgcaggacgatcatgttgagatcggccgagatgtccgccagcggaaatgtatgaatgtaaaccaccagcagggcgctgatgtatttggcgatgtcaatggcggtatagctcttgcttttcattgtcatcccttcctgatatagatccgcggcacccgggcggtgatccgcgtcagtgtctcattgttgatggtatgcgccgcgcggctcatggcatccacgctcacgcgctcgcttccctgtgttccgatgagcgtaacgacgtctccctcttggacatcctccacctcgctcacatcgatcatcagctgatccatgcagatgttgccgatgatcggcacgcgcacgccatgaagcagcacctcaaagccggtgttggagaggatgcggggaatgccgtccgcatagccgatggatacgctggccaccttcgtctcgcgctcagcgcggaaatggcggccatagcttacgctgacccccggtgcgatcgtcttgaccatcgtcacgttcgcatgcagcgagaggatcggatgaaagtccggcgcggtgttgatcgggatctgatcatcgctcgtcacgcccatgtacaacagtcccgggcgcacatagtcatagtgcagatcgggatagttgaggatgccatagctgttttgcagatggcgcacgccacagtcgaagccggcggcctgaatgtcgctgagcacccggtcgaacagctcgatctgatgcgctgtgaacgccaggtcctcttccgtgtgcgagtcgctcacactgaaatgagagaagatgccggtgaccttcacgtgcttcatcgcatacatcttgaggatctcttcgatatgataggcgtgatcctgcacgatgacgccgatgcggctcatgccggtatcggccttgacatgcgcttcgatcacgcagccctgcgccttcgcgtaggcttcgagcttcttggcataaggaaggtcgacgagcgtctggatcagatcacattcatgcagatagtgaaaatgcgcaggcggcgtgtagcccaggatcaggatagggctgtgaatgccgtgttcgcgcaggtgcacgccctcatcgacgctgctgaccgcgaagaaatcgacgccgcagcgctccagctcccgcgtgcattccacatccccatggccataggcatccgccttgacgatgcccatgatcttgctggatgcagggatgagctgacggatctgctggacattgtgatcgatctgggtcagatcgatctgggcccaggcgcggctcttactgttcagcacggccatcacccccagctttgcgctgcagcgcaagatccaccagatcatcgatcaattgcggaaaggggatgccgatctccttcatcatggaaggataacgggaggtcgcggtaaatccaggaatggtgttgagctcgttgaagatgatcgtgcgggacggcgtgacgaacatgtccacgcgggtcatgccgctgcagttcatggcgcggtaagctctcttcgccatgtcgcgcgcggcctcaaacagctcctcatcgatgcgcgccgggcaatagatggccgcatccttcatctcatatttaccttcataatcgaagaagctgccggcgatctcgatctcatcgacgctgcccgcgatcacttcctcattacccatgacggcgcagccgatctcaaagccttcgatggccttctccaggatgaccttgccttttccatcgtgatagaacgcgtccgcaagcgcctgcgcaaacccttcttcgccttcgatgcaatggatgccgtaactgcttccggcattgcatggcttgatgaagaacggcaggagctgatcgcgcgcagcggcgaacacttcggcaggatcgcggtgctcccaggcatacacgctcatatacggcgcgcaagggatgccggcatgctcgacgatgatgtgcgtcatctctttatccatgcagatggcgctgctcatgtggtcgcagcccacatacgggatatcgctcagctcgaacagcccctgaatggtgccgtcctctccattcttcccgtgcaggacgggaaaaatacagtccagatgacggatctcataagatccttcgtgcaggatgagcagtccatcgtgggtcagcgcgcaaggggtgcacttctcctgctgccagcggtcatgctccagggcgtcgatgcttccctcatacaggaaccactcgccttccttggagatcgcgatcatcgtgatcgcataacgctctgtgcggatctgccgcagcaggctggctgctgagtgcagagataccgcatattcgcttgatttcccgccgaatacgacgccaagcgctgtcttattcatgttcaacacttcctttgtccttttccgtgagacagtcgacgacactgtccatatgcatgccgcgcgatcctttgatcaggatcatgcacggcgcgtcaagctcgttcatcagcgatcgctgcatcgcttccttcgtctcaaaatgggtgacatccttcatgccggcgttgatggcgccctgtgccgtaaagcgggacatctctccccatgtgcacaatcggtcgatgccgtattccgccacggccttgcccaccgcataatgcagcatcgggccggcttctcccatgtccagcatgtcggacagcgcggctacccggcgcggcacatcgaagtcatgcagcgtcttgagcgcggccagcgcgctctgccggttcgatttataagaatcatccaggatccatccttgtctgaccgcgatcacgtcgttgcgcatcccggtcttctcgatgtgggcgagccctgcgaggatctcttcctcgctgagcccaagcgccttggcggcgtagatggccggcagggcgttgagcacctggtgcgcgccatagacgttcatgtagacttccgccgccatcaggttggtgcagaagcgaagcccgtccgcgccctgctggatcctgccgtagctgaacagatcctgttcccggctgctgccgaagctctccaccgtgacgcctgcgggcagctgttccgcagcgagggcggcggacagcaccggctgttccccattatacagcaatacgccgttttccttcagtccatgcacgatttccgccttggcgcgggcgatgttctccagcgagccgagattttccagatgcgcttcgcccacattggtgatgatggcgatatccggcttcaccatgcgggtgagcaggtcgatctcgccgcggttctccatgcccatctccaccacggccacctgatcctcctctgacagctccagcagcgtcagcgggacgccgatctcattgttgcggttgcccttggtcttgccggtcacatagcggcgggagagcatgctgctgaggatgtccttgaccgatgtcttgccattgctgccagtgatgccgatcaccaccagatcgagcgaatcgcggtaggcagacgccagcttctgcaatgcctgcagcgtgtcgtccacgccgatcaccggtatgccatggggatggtcaggatgatccttctgccacagcaaagcgcctgcgccctgcgcgatggcctgcgcggcataatcgtgcccgtcgaagcgttctccgacaagcggaatgaaaagagaacctcttccgcagctgcgcgagtccgtgctcacgccgctgatcacggcatcgaggtctcctccctctatcagatccgcatccagcatttggatgacggagtcaatggttcgcaaaatcatttcattcacctcatcgcgtcagatctctttcatctgagcccatatattatagcatagtttcattactgcggaatatttttggccggaattatgaaaacaattccgtcactttgtttcagtccgacgcttttgcttacattgcctttcatttctcccgattttacatttgtcagataccatcttacatagattttacatttttctgcgattttgtcgttgttttttacaattattttaactatagttaatctgacaagcaaaaaggggtgtctttaatgtcaacaaccaacttcttgagtctgctgggcggtctcgcccttttcctctatggaatgcagatgatgagttccggtctggaggcggctgccggcgaccggatgaaggaaattcttgaaaaactcaccagcaaccgcttcctcggcgtgctggtcggcgcagcgatcaccgcggtcatccagtcatcgagcgcgacgacggtcatgaccgtcggcttcgtcaatgccggcatgatgtcgctgacgcaggccgtatggatcatcatgggcgccaacatcggaacgaccatcaccggacagctgatcgccctggatgtgggcgcgatcgcgccgctcatcgccttcatcggcgtggtgctggtcgtcttcatcaagaagccgcagcttcagcacatcggcacgatcttcgccggcctgggcgtattgttcatcggcatggagatgatgagctcggccatgcttccgctgcgcgaagaaccggcgttcatccagatcatgacatcgttctccaacccgctgctgggcatcctggccggcgccgtcttcacggccggca

SEQ ID NO: 4512 - DNA, 4202 bp, Unknown
  16S sequences of unknown bacteria
tatatcatagtgttttttagggtgtgtaacggtgagaggcttttattgatgtgttgaccatgatcggggggctgtgtctctttctgttcggcatgaacgtcatgggtcaggcccttgaaaaaagggcggggggaagccttcgcaaggttctcggcaagatgaccacaaaaagagcggcgggctttttgaccggctgcggagttacttccattatacaaagctcgtcggccaccacggtaatggtcgtcggttttgtaaactcgggtcttatgacccttaaacaggccataaacgtcattatgggcgccaatgtcggcacgacggttacggcgtggatactgtctctcggcggcataagcagcgacaacaccttcgttaagcttttaaagccgtcgtcctttacgcccgttcttgctcttgtgggaataattttttatatgttctcaaaaagtgacaaaaagaaggacacgggaaccattcttctcggctttgcgactctcatgttcggaatggagaccatgacctccgccgtgtcgggactgtcgcaggtgccggccttcaaacagctttttgtcaccttttcaaaccccgtgctcggtgtgcttgccggggcgatgctgactgccgttatccagtcctcctcggcatcggtgggaattttgcaggcgcttgccatgaccggccaggtcagctttgccgccgccattcccattgtcatggggcaaaacatcggcacctgtataaccgccgtgctttcctctgttggcgccaacaaaaacgccaagcgggcggcctttgtgcatctttcctttaacgttatcggaaccgccgtgtggctgacggttttctcggtcgtcaaggcgatttttcatcccgcgtttctttccctttcggcaagccccgcgggaattgccgtggctcattcggcctttaacctgctttgcgttatgctgctcatgcccatggcgtcgctgcttgaaaagctggcgctcagggtcattcgcgacgacgaagtccccgaaaaggacgaaaagcttgacgaacgtctgcttgtcacgcccgcccttgcccttgagcaatgcaaaagcgtgaccgccgacatggcaagaaggtctgtcagggcgcttggcaacgcacttttatgtcttgaaagctattccgacgagcttgccgacaaaataaggcgggacgaggaaaaaaccgataaatatgaggacatttgcggaacctaccttataaagctgtcggccaaggacctttccgactcggcaagcgaggaggcggcgggactgcttaaaatcataggcgatttcgagcgcataggcgaccacgccgtcaatcttctggaatcggccgaggaaatgaagcgtaagggactcgagttttcccccgaggccaaaagcgatttgaaggtcatgggcggtgcggtcaccgaaatattgaatttgaccctgaccgcctttaaaaacggcgatattacggcggcggacaaggtcgagcctctcgagcaggttgtgaacaccttaaaggagagcctgcgtacccgtcacattttccgtatgcaaaagggagattgcagcatcgaggcgggctttgtgctgtcggacatcataaccaatctcgagcgggcgtcggaccattgctccaacatcgcggtatgtatcatcgacgaggcgcaccacaccctcaacgtccacgaaaccctcaagagaacccgccgcgacagcgaggaattcaagcaggatttcaaggcctatgcggcaaaatatgccatataatcgaatgtaaaaagaaaacgcagacggaaaagcgtctgcgttttttatgttataacaaattaaaggctgtcgatgtaactgcaggcggcaagcgcggcaacggcgccgtcggccgcagcggttgtgacctgacgaatccttttggcgcggcagtcgcccgccgtgaaaatgccctttgttttggtcgtacagtcctctcccgagacgacatatccgctgccgtccaggtcgcaaagcaccgagaagggctcattttgcggcacaagtcccaccgccaaaaaagctccgccgcagggcagaagaagattgcttccgtcggattttttgatgttgacgcccgaaagctcctctttgccttcaaagccttccaccgtcgcgccggtgattatttccacgttttcttttgaataaagctggtcggcaagggtcttttcgccggtgagaaaatcgagattttgcaccaccgtgaccttgctgcaaagctcggaaagcagaaccgcctcctggagggcggagtttccgccgccgatgacggccacgtcctgccccttgtagaaggctccgtcgcaaacggcgcaaaaggaaatgccgtttccgatgaatttttcttcgttttcgacgccgagcagacggtgctttgcccccgaggcgattatgacggccttgccttcaaagtctccgccgtcggtgacgacggtcttgacctctccgtcctttacggaggaaacctcggccatttccatgtcggctccgagggtcagcgcctgctccacaagcttttcggcaaattcgttgcccgaaaggggagcaaatccggggatgttttcaaccttgggggaaaaggttatctgtcctccgaaggtctccttctctataacaagaaccgattttccggctctttttccgtaaactgcggcggtcagccccgcagggccgccgccgatgattataatgtcatacatttgttacacccgaaattcagttgagatgctttttgatgtcggagacgccggagaatttctcggcctgtccgtcctttatgaccacaagggtgggagcctgcttaacgcccagctcctttgcaaaatcaggctgctcgttggcatagaccttggtgtattccacgccggccttgtcaagcgtcgcgcaggctattttgcagttggggcaggtggcggtcacaaaaagaatgttgccgtcctttatcgactcatcggcaggagcttcggttatcttttccgcaacggtctttgtgtcctctccgccgataacgccgtggtgggtgagggtggagcggccgatgtcataaaccttgcggtccttatattcctgggttttgccgtcgttccagttttgaaccgggcggtagtaaccggtgattcggctgtatatttcggtggtctcgccgcaaattgggcactttttctgttcgcccgacaggtatccgtgggtcttgcagaccgaataggtgggggacatggtgtagtagggcagcttgtagttttcggctatcttgcggacaagatttgcagccgccttccaatcgggcagcttttcgcccaggaatgcgtggaaaacggtacccgaggtgtagagcgtttgcagctcgtcctgaacgtcgagagccgagaaaatgtcctcggtgtatcccacgggcaggtgggagctgttggtgtagtagggggtgtcgtcgcagctcttggcagcggtgatgatgccgggaaagcgcttgacgtcgtgctttgcgagacggaaagaggtggactcggcgggggtggcctcgagattatagaggtcgccgtactgctcctgatagtcggaaagacgctctctcatgtggttgagcacctcgacggtgaagtcctgggtctccttgtgggtcaaatcctttctcagccatttggcgttgaggccggcctcgttcatgcccacaagaccgatggtggaaaagtggttgttgaaggtgccgagataacgcttggtataaggataaaggccgttgtcgagcagcttggtgatgaccgttctcttgattttaagagatcttgcggcaatgtccatgagcttgtcaagacggtcgaagaaatcctttttgtcctttgcgagataggcaattctgggcatatttatggttacgacgcccaccgagccggtggactcgccgcttccgaaaaagccgccggattttttgcgcagctcgcgaaggtcgagacggagtctgcagcacatggagcgaacgtcggagggctccatgtcggaattgatgtagttggagaaatagggggtgccgtatttggcggtcatttcaaagagaagcttgttgttctcggtttccgaccaatcgaaatcgcgggttatggaataggtgggaatgggatactggaagcctctgccgttggcgtcgccctcgatcatgatctcgat

SEQ ID NO: 4513 - DNA, 3222 bp, Unknown
  16S sequences of unknown bacteria
ctcccccgccccacggtgcggggatatacgtccgcatttccgtcggtctggccgtcaccgtcttttctccgggcaacgttaatctggtcgggtttgccccggctctgtcgtctctcttctccttttgcgccttcggcgccgctggataagtgagagttcccccgcgcccggcctcggcgctttattccgaccgcctgcggtcttttcgtcgcttacctgcctgccgcgttttatttctgctttcgttcgggctttttccgcggttgccagacgtattttgttccgacttcctcacggtattttttccgttttatcgcttctacgctattatcgtcgaacgcctcaaatactttcttatagaaaaagctgtgcacgctctgcatctcctcacagctcggacgcagttctttgtattgcggaaaatcgttcaggcccgtttttgagcgcagcgccttctgcgtgtaaaactcacggatactgtccgtcgcaaatcggttgttatataccttatacgtacagatataatatttgcccttatccgtgatttgctctcccgccatttcattcgttatccgcaccgttcccacatatacagaataacggttgaatatcttctcgtaatgtcggtataatgcccgatacagctttttcacgagatacaggaaaagcgtattgtccccgcgcaggtttcggagctgatagtaaatcctatcgaaaaaattcgtcgctatcagatacgccgcttcttctatcgcgaaacccggcatcacgattttcgcctccgacattttcttgatcatcacgctgtcgcaaagatccttgttatccgcgcccagagaatccggacgctggtcgtccatgaacattctgaaaaacgtgtaattgtccaccgtcgccgcgtgtccgcgcatttttacgtcaagctcgaaaaggtcgtttttctgattacaatcgggatcgtttatgcttcccgttctcgtatgctggttcccgcggtctttcgctacctccatgatattgataatcccgatttccagaccgtctttatacttgcccttgtcgtcaaacactttcccgagacgcattccgtcctcgtctaaaatgtgagaataggcggagggctgttcgatacgggaaaagaaatcgtccgcatacagcgggaaattcccgaaatccactcgccccgcgtccgttcggatcgcatagttcccgatcagcagcggcgtaggcgacgcatagatccaatacagttgcgcatacgcttccagcgcctcaaacagatccaccgttcccagcccggctttatacgtcattccgttttcggggttgtaaccgaacaaaaaatcccgatacggataaccatatttccgggaaaggattttcaaaagcctttttctctggcggctatgtaacccgcagccgaatttcagatacccgataaaccgccgtactttcgccaatgtcgggaaatatcccgccgctatcccttcttccagatacttttccaacagaatccacgggaagaacgggaactgcatatcccgcgcttgcagtttttctttcgccttttctcggaagattgcctcttgtgagagcgccatatccgtgatcatcgtcgtttttttcgcacgctgcttcccgaccacgaacagcgcccccgggtgcgattccagaaagtcccggtcccgcgcctcgtatccccgcagacgctgcgtccctatattcttgcggatcgcgtcgaaaatcagaaatccgattaccgcccagctccaccatggcaagaaattgattgccaccgtcagatccatcgacagctttgcaatttgcgtgaagattcccaatgcgtcaaaactcaccgcgaaatagaacacgaacgcaaaaaattccatgacgatcgtcaccgcgttcaggttgtacgaccagatcaaccccgcggccagaatataaatccgatgttcgttcaggaagcccgcatagtttttgaaaaacgctttgcaccttccccacgtcgccgtttcgattttcttatacaatcgcagcggctttgtgtccgcgttataattattatttggccgcctgtatgcacttttgattaaaaaccacaataacacaagtacgggaagaatcaggattgccgctttggcgaacgtcgaaagtcctttcaacagtcccagaaaaaacgcctctgcgttttctttggaaatcagagctttcccgtacgctttcaggcccgttataaactccgaaggctgaaacggcaatacttccgttgcgttagtcgggatccccccgactgtcggcgtgatcacgccctcgaaccctaaaagctccgtgaagtagtatgcgacggataatccgaagtccttgaacgcctgaaccgttcggaagaataccgcgcggaaatagaaaacagaaaacaataacgagccggccaataccgccgcgcttacgatatgataaattatccggcggtctattcgccctctcgcttccttttccattttcagaatacccgcttgaatgtacttatcagatacagtaccgccaagattatggcgacatatatcacgattcggattatcagtttcaaaatttttaacattttttgccccaacctattgactttttccgagtttttgggtataataatagtagttccttcgggatagctctttatagagccttggttgaaataccatgttagtatagcggggcgggggactgccccgtttttattttcgccctttcaattctcgcaacttatttcggttgtcttttcgtttgatactatcttttttgatttgattgacatctttttgcgaaacatctttctgctgtttattgggtagaaattttttcccaactttaataggtttgttttcatcatcttttgttgcgacaaaaggacggtatttcgattttccctgctgataatcgggtaaagctgttccttgctttgaggttgtcaacttcaccactgcaagttcatcagctcggttactgtccaccactacgacttttcgatacagccccttattttcataaccgggctttctgtatttttcttgtccttcaaaaaattcgtcacgggtttgtaaagtccgtccgttcggaattttttgagaaacattcttccgttgcgattttgggctgtttgtctttttctctgccggttttgctttcgacttcgaattttcgattttattcttccccgccgcttta

SEQ ID NO: 4514 - DNA, 2628 bp, Unknown
  16S sequences of unknown bacteria
attgtgaacggcgagatcaccaagattaactccgaaactcgtgttcagaagtacaccatgtacacggatgctaccaagaactccaaggatgtgtacaacttcaccaacgccacttatgtggatgacagcggttctcacagcacagccactgatctggcatacaccaccggcaccgataaggtggagaacggcagcgtgacgctgggcaacaagatcctgagcgtggcagacgactgcaaggtgttccgcatcagcgccgacggcgaagagatccttgtttccaacactgcttccattgtgaaggatcagggcacctatgccgataaggtctggtacaagaccaccgacggcgaagtgaccaccatcgtgatccagacggtggatgagactgttacgccgactcctacacccggcgataccgagtatagcgcgaccatcgatacgaatctgctgaccgcttctgttaccggttctgacgcagttgcatctgcaaagcagaacgatattaagaatgcagttgccaacgcagtaaaggctgcgggctacactgttaccgcatggggcggaagctacaacactggtgatggtaccggcctgacggtgagcattgtcttgggtacaacaaccagcggcgttcccacgacacttgcgatcacttacgcacagcaggcataattttactgtttcgttcgtaactcatttgtgttataacgacaaaaacccccgtgccgtatggcacgggggattttgtatttcaaagatgcagcccatagagagaaatcttactccccgcaccgagcgtttgctttggttccttcggaaaaatggtcagtgtggtcagattttcataagacagctgataattgcaccccaaaagcacagtatcactgagggtcagagccgtgattaaacggcgcttgtcacacagcgggaaaaaatagatttcgtggcgctgcccggctgtccgggcgggaaatttagacagacaatcggaagtagattcaaatacggaaaactgattaaagaattcggagtaggactgattgctgcgcaagcgcatttctccatcccctaaaatttccaggcgcagcagaacggtatgccagtggccaaaatcaatgtcactgacgtcgatgtccagttgtgacgtgtcgtttgaaacgatgatggattttaagagttgtggatcccgtgccctgcatgcagcgatggctgcatccaccttttgattgtctgcattgaaatcttcccgcaggacgcgatcagccgcatcccacaggttcaatcgatagtgttctgtatacttcaagtcgatttctcctttatgtagtcgaatttggggcttttccgaaaaaaggccctacacttaccgtgtagggcagagcaaaagttgtacacttccgggcaacaaaactaaaaaaatatggaaaactctcccgctgattcagcgggagagttttgttcaaacggaatgcttaaaaaataatggttccgttcagttcagaaattccgcgcccattttaatgagcgcaaacacgcaatagttgattacatcgtgcagctgggcgctgacgccctcggacacagtgcatttgccgccgttggcgaggatcttgcggatacggtagacgcggataatgacctggtcggtcatggcgcccagggacatgctcttccaggcgtcgccatagtcggtgtttttgcggatcagcagggtgcgtacctgatccatttgagcctgataggcggcggtgagcacatcctcgccaatgccgtccaggaccgaaatgtcgtccgtcaaatccgcttccgaaggaagcccgggagcggattgcagtttgatcaagaacatgatacagtaattaataatgccgacatattccacatcgcggccttcgtggatgcaggcgcgatccccatgttcttcgagggtgcggatgcgcttggccttgcgccagatctcgtcgttcagggactgggggcggtataaaagccaggtgggaccgtagtcggcgtttttggctttgaacagttcaaagcaatacgcccttgttttatcaaattgagcaagcagttcctctgccatagtatccgttcctcctgcagtaacattgtacgcgctgcgcgcggggcataaaacagtataccatgccggggagaaggtggcaaggaaatgcggggaaagaattcgggcgttgtttggaaaaagtttaaaacgtgctgcattttttggagcacaggggtatgacggtggtgacgtggcattttgctgaggatgtggagcttcgacaaccaacgcatccgatgacaccctgacaggccggtatgataatttgggcagcagcgcgggcggacgtatttggctgcttgtagctgccgagaaatcatgttgttcttaccgatttcttctttataacttttcctggtattggctcccccggaaggcatgtgctttccggggattccggcgtctatggaaaaagactgtttgccctaattttttccagcccctgtctaccatgtctaccggatgtctacccaaatgggaaaggaaaacagctgggggacaagagatagaagaaaggcagcgacagcatctgccggcgaaatgtctaccaaattgaacat

SEQ ID NO: 4515 - DNA, 19505 bp, Unknown
  16S sequences of unknown bacteria
ccgccgctgccaagggtcagtatatccgttcctgcgtaattgccaccaccatgggccctggcatcaagatcaaccccggccgttatgccgctgttgctcccgctgagaacaactaagatccctgcttaacggaacacaaaaaggactgcttcggcagtccttttttgcgtctgtgggggcctggcttccgggcacagccggacgggtttgacattgccccgcctgcctgttatgatgggctcaaaggggagggaaatcctctctgaccgatgggaggaatgagcgatgatcgaactgcgccgggcagtgccggaggatctggactgcctgtttgaagcggcaaattccgcctttgccgggagcaccgtatcggggaaaggcccccggtggaaacgcagccgggagttccttggggactgcctggcagagcaggagtgctggtgcattctgctggacggcaggacagtgggcggactgctcctgttcccgcagcctgactgcctctggctggagggcgcctttgtggaggcaggccatcagggggagggcatcggacagcaggccctgggggagctgctcaggcggtacccggaggccacatggcggctcaagaccccggcagcggacaagcgggactgccatttctatgaaaagctgggctttgcgcgcaccggcactgaagccggtcacggcggacaggagttcgctttgtacgaaaagaaaatattttagcggttttaatggataaagcgttgacaagctgtctccggtctggtaacatggggtttatcaatttaacgcgtgtgattggaggagaatgtcatgcccctatcccctgaaacgctgctggctgagagccagctccgaagaagctaccgcaaattcctgccggaaccggtggaccgtgctgttctggagacctgtctgctcaccgccagcaccgctcccagcggcgccaacaaacagccctggcacttctgcgtggtcaccgacccggtgatgaagcagcgcatccgggagggcagcgaggcggtagaacgggagttctatgctgagcatatcaccgacgaatggcgggcggatctggcaaagctcaccctggcggtggagaagcccttcctcaccgaagccccctgcctgatcgtcatcttcaaggagtggtggagccagaaggaggacggcacccgggacaagaactactatgtcaccgagtcggcctgtctggcgacggggctgctcatcaacgcgctgcgcaatgccggctatgcttccctgacctatacgccggcgccgcccaccttcctgcgggaactgctgggccgtcctgaaggggagacccctatcatggtgctgtgtgtgggcaagccggacccctcctatgagctgccaaagctcacccggaaggaacttggggaatttaccagcttttttgaataaaaagtctgatttccgccgagaaaacccttgacagatgggtgtttctcttatataataataaagctgtcatgtttcttaagacagcaggtgttttataacataaagggctttggcccacctgccgaggaagactgatgcgaaatggatcttttctgatgtattttgctccttccagcggcgctgggaggagctttttgtatccacttttattgggaggtgaacgaattgccgaacgagagaacaattcaggccaagaaggaaatcgtagatcagctcaaggctaagctggacagcgccgttacctgcgtcgttgttgactataagggtatttccgtagaggacgataccaagctgcgtaagcagctgcgtgaagctggcgttgattacttcgtagccaagaacactatgctgcgtctggctgccaaggaggctggttacgagggactcaacgagtacttcgagggtaccaccgccgtggctatcagcgataccgatcccgtatctgccgccaagatcctcaacgactatgctgaggatgccaaggccaacttcagcctcaaggctggtatggtagagggcaagatctttgacaaggctggcatcgaggcgattgccaagctgccgagcaaggatcagctgctggctcagctgtgcagcgtcctgaacggaaacatccgtggcctggctgttgcactgaatgctatcgccgagaagggcgagcaggaaatcgcataaccatcattttcataccgaatcaatctatttattttaggaggtaaactacaatggcttctgagaagatcacaaagtttgtagaagaaatcaagactctgaccgtcctcgagctcaacgagctggttaaggctatcgaggaagagttcggcgtatccgctgctgctcctgttatggttgctgctggccccgctgctgctgctgctgaggagaagaccgagttcgacgttgttctggctgacgctggcgcttccaagatgggcgttatcaagctggtgaaggagatcaccggcctgggcctgaaggaggctaaggctctggttgacgaggctcccaagaccatcaaggaaggcgcttccaaggctgacgctgaggagatcaagaagcagctcgaagaggctggcgctaaggttgagctcaagtaagctctcgcttacccgaatttgttcgcttcaaaaaagaggttccggatctgttccggagcctctttttcttttgctctgaaggaggttccggatgcataaagtcctggattggcacttatactatcagagcgccagaatttttgtaaacaaattgtgaaaccccttgacattctccggggtgagtgatacattatagatgttggcactcgaggtaaatgagtgctaaaaccaaaaggaggcggtaacaatggaactggacgaacgaaaacgccgggtgctttcgatcattgcggatctttacaccaagaccggtgagccggtcggttccaaggtggttgcactgtatctggacagtgcctactcccccgctacgatccgaaatgacatggcggccctgtttgacctgggactgctggaacagccccatacctccgccggacgggtaccgtcccatctgggctatcgggtatttgtggatgagctgatgcaggtcaagccggtgagcggaaagctccgggacagcatcgaagccatgttcaatatccgggaccccgatcccgacaagctgctccaggacgctgccaaggcgctctcggagattacaggctgtgcggccttcacctccacccatacccccgataccgtaacggtacggcaggtggagatcattccctcgggcgaacatgctgtggtcatcatggtgatgacctccaacggtgtgatccgcagccgggtatgccggaccaacttccgggtcaccggggaggtagtggagttcctcaaggcctactgtgccggcaaactggccggccggacgctgcgggagatctcgctgcagtatatgggcagcgtgaccatggaactgggagaatattcccggatcttcaccccgctgttcgcggcgatcttcaacctctgtgcggagatctacggcggacagtattatatggaaggcggcatcaagctgctcagctatccggaacttgcccgggacgccgaccggctgctcccctatatctgggagagccggaatgtgcagaagctgatccagcgggccagccccgaacagactacgatctttatcggcaaggaaaatcagtgcgaagagctgcagaacagctcggcagtgatcaccccctttgccattggaaaccggagcaccggttccatcggcatcatcggcccgatccggatggattacgccgccatggtagccgaaacggaatactttgcccggctggtgggagaacttctcaccgagatatttgaggaatagcggcagatgccgtgaaggaggcagatggatttgagcaaagatgcgagcaagaacaccgagcccatggacgaggagctgaaggacaaagtgccggaaactcccgaaaccgaagctgtaccggaaacagaagcagcagccccggcaccggagcccactgcggaggaaaaactccaggcacagctttcggaactcaatgaccggtacctgcgcaccctggcggagtatgacaactaccgcaagcgcacagccaaggaaaaagaggcaatttaccccgaagccaaggccagtacgctggcaagcatgctgccggtgctggataactttgagcgggcaatggcagctccctgttccgatgccgacttcaagaagggcatggagctgatccgcaaggcctttgacgaactgctggaaaagcagggcgtggaagccttcggagaggtgggcgatccctttgatccccagctccacgcggcagtagcccataccgatgacgaatcggctggggaaaactgcatcgccgaagtgttccagaagggttaccgcatgggagaccgggttctccggtatgccatggtcaaggtggccaactaaaagagtcaattcccttattcatatagatagacttatacgaaaaagatttggaggaatgaattatgtctaagatcattggtatcgacctgggtactaccaactcctgtgtatccgttatggaaggcggcgagcctgtggtaatcgccaacgctgaaggcgcccgtaccacaccgtcggttgtcgctttttccaagactggtgagcgtatggtaggtcaggtcgcaaagcgtcaggctgttacaaaccccgaccgtactgttatttccatcaagcgtcacatgggttccgactacaaggtttccatcgatgacaagagctacacccctcaggagatctctgccatgattctgcagaagctcaagggcgatgctgaaaactacctgggcgagagcgtttccgaggccgttatcactgtaccggcttacttcaccgatgcccagcgtcaggccaccaaggatgccggtaagattgccggcctgaatgtgcgccgtatcatcaacgagcccaccgctgctgccctggcttatggcgttgataaggaaaacgaccagaagatcatggtttacgacctgggcggcggtaccttcgatgtatccatcattgagatgggcgatggcatccagcaggtactggctactgccggtaacaaccacctgggcggcgatgacttcgatgagcgcatcatcaactacctggctgacaccttcaagaatgagaacggcatcgacctgcgcggcgaccgtatggcaatgcagcgtttgaaggaagctgctgagaaggccaagattgagctgtccggcatgaccactgccaacatcaacctgcccttcatcactgccgatgccaccggccccaagcacatggatgtcaccattacccgtgccaagttcaatgagctgaccgctgacctggtagaagctaccatgggcccggttcgtcaggctctgtccgatgccggcctgcagccctcccagatcgacaaggtgctgctggtaggcggttccacccgtatccctgccgttgttgacgctgtcaagaactacatgggcaaggaccccttcaagggcatcaaccccgatgagtgtgttgccatgggcgctgccattcagggcggcgttctggctggcgaggtcaaggacctgctgctgctggatgtaactcctctgtccctgggtctggaaaccctgggcggcgtatgcacccggatcatcgagcgcaacaccactatcccggtcaagaagtcccaggtattctccaccgctgccgataaccagaccactgtggatatccatgttctgcagggcgagcgtgagatggctgccgacaacaagactctgggccgcttccagctggatggcattccggctgcccgcagaggtgtgccgcagatcgaagttaccttcgatattgatgccaacggtatcgtaaatgtatccgccaaggatctgggtaccggcaaggagcagcacatcaccatcacctcctcgtcgaacatgtccaaggaagatatcgacaaggctgtcaaggacgctgccgcttatgccgagcaggataagaagcgtcgtgaagatgtggatacccgcaacaatgctgaccagatgatctatcaggctgaaaagaccattgccgatgcaggcgacaagctggatgcttcggacaaggctgctgctgaggccaagatcgctgagctgaagactgcaatgcagggcaccgataccgaggccatcaagacaaagctcgatgagctgcagaaggccttctatgagatcagcgagaagctctacaaggctgctgctgaggctcaggctgcccagcagggtccggctgccggcgacaacgctggcgctggtcagaatgctgactatgtggacaccgattacaaggatgtcgacgagaacggcaacaagtaagtaaatcagttccaggtccaaaagggcggcgcgagtgaatcgcctgcccttttggcgggttgtggcagtaaaaccgggctggcaaaccatcgggaactgtgctataataataacctgcttatccggcagcaaagccggaatctcaggcagtaccagacagcacagctgatggtctggagcctggaagggggagtacgagtttggctgagaaacgagattactatgaggtgcttggcgtatcgcgtcaggccaccgatgatgaaataaagaaggcatatcgcaccctggccaagaagtatcacccggatctcaacccgggggacaaggaggccgaggccaagttcaaggaggccggtgaagcatacgaggtgctttccaacgcggaaaagcgccgccggtatgatcagttcggctttgccggtgtagacccgagttacgcggctggagccggcggctatggcggtgccggtggtgcccagggcttcggctttgacgacatcggcgatattttcgagagcttcttcggaggcggcggattcagcgggttcggcggaagcacccgtacccggaaccccaatgcccccatcaagggctccaatgtggagatcaccattccgctgtcctttatggaagcggtcaagggctgccagaagaccatcaccatcaagcgtctggaagtctgctccgactgcggcggcaccggcgccgaaaagggttcggctgtggaaacctgtcccgactgtcatggcagcggtcaggtaacagtacagcagcgtactccctttggcgtcatgcagacagtccgcacctgtccgcactgcggcggtaagggcaagatcatcaagaacccctgcaagaagtgcggcggcaagggccgtgtccgtgtcacccggaagctggatatcaatatccccgccggtatcgacgacggtcagaccttcctggtacggggtcagggcgaccatggcatcaacaatggtcctgccggtgatgtggcagtcactgtcactgtccggcccgatccgctgtttgagcgtgacggcttcaacatctggtgcgaagtgcccatcacctatacccaggccgtgctgggcgatgagatcaccgttcccactgtggacggcaaggtcagctataccgtgccggaaggcacccagtcgggtactgtattccgtctgcgcaacaagggcgtaagttatgtcaacggcggcggtcggggcgaccagtatgtcaaggtgagcatcgaagtgcccaagaacctctcgggcaagcagaaggaactgctcaaggagttcgataagctctctagcgataagaacttcgaaaagcgcaagggcttctttgataagctcaaggatatgtttgactgagtgctttgctcagtatgaaaaacccctccggacagagattgtccggaggggttttgttttgcttcggagcggttttaccagtccatctgttcaagagcttcgttcaggtcgattgtaaaggagaggtagggctcccgggtctccttgattttctgtgccgcggcgtaaacttcctgcccggtccgttcgatcgcgttgttgaaactgaacccgtttttcacttccacttcctgcacttccgcggtatagagggttacctcgatctggttcccatcgtccggaagtccgctgagatcggtgaggatcttctgcaccgttcccttcgtatccatctgaccagcagttctgtttcccaccagatccagatcccggaaatcgggattgtcctcgtccagcaggagcagaagctggggctctgcctcggtgccgcagatgccataccaggcctgtacggtttcatcgccggtgtccaccgggtacatggcgctgcgcagcacttcgccgccggtgatctcctccggggcaaggcaggctgtgacaatgccatagccctccccgtcggcatagagcccgatgcgcatatcggtggtttcagcaaagggattgaagtcttcgatgtagtccaggccggtgctctccagcaggctgtccagctgacggtagtgctggatctgccgctcctgccgcatctgatccttgaccatggaaaggattacaaaggcgcccagaaagaccatcaccgagatcatcagaaattgcttgagcttgctcatccgcattccctcctttcaggtgctgtcaccacccggtctggttcagggcttcggtcagattgatggtgaactcgaaatagaggtttttggcatcctgaaattcctccgaggtttccaccacatctgaagcacttttttcaacaaaattgtagccgaaatccagttccagatccacatcctccgcagtgtagagggaaacagtcaggttgttttcactgtccggaaggccggggagatccaccagcatggtatccactcggtattgatcttggaggtaggtcagggagcggtgatcggcgccattcagctccatctcccggcagagaggctcgtcctcatccagcagaagcagcagtttgggattggccttggtgccgcagattccataccagaaccgtatatgctcggttcccgtttcggccggaaacatggggctgcggagcagttccttttctccttctgccggcaggcaggcggtgactatgccgtacccgtctccatccgcatagatgccgacatccatgatgtaatcttcctcgttggagctttcgtagtaaaggtagtcatagccggtgctgttataaagctcatgaagctcggaatagcggcgtctctgcatctcgtccttgaccatcggaatcgctacataggcccccagaagaaccatcgcagcgatcaaaagggcttgtttcagtttactcatctgctttgcctcctcttttttctggtattccttaactttagtgtatcactgtgttgacacagcgtcaagaaaaaacaggcagcttgtgatgctgcctgtgtgcattctattccagttcttccagagcctgggtgagatccagcgggatctcgcagtagggggattttggctgaagaccctgcttgagatcgacatcagccagggttacagtcaaacggttttcgctgtccagcagcccctccagaggttcggtcatccactccaccggctctccgagggagttggtcagttccagggagcgctcctctcccgaaacacccagggaacggcaggtgggttctgtctcggtcagccgcagggccagccagggctcctccggcgaaccatacaccccgtaccacagctgaatcccgtcactgccggtttcagcctgccgcatgggctggtcggtgatcaccgggtcctgctgccctttcaccgtccggaccgaggtgaggaaccacccttcgccatcggtatacagaccggcagtcagttccgaaccggaggccacataggaaaagctgtgtccggtctggtccagcacttcgccgagatggacttccccttcggagatggagtcggggtttgcattggtacagcctgccagcatcacgcagcagagccctgccaggatcagtcgtttcatacaggttccctccttggttagttgtacctaattctatcatgggcgctctttgcaaatcaagccaatacttgtgaactttctgtttttttgctatgataatactatctatagtttttgtaaaagttctgtaagctgggaggttcattatggactggactgagatcaatattgaaatttctgccgatcaggtggacgaagcagctgccatcgcccagatggtagtgccctatggcatctatatcgaggattattccgatctgcgcaccgaagcgccgaaaattgcccatatcgacctgatcgatgaggagctgctccagaaggacgtgaccaaggcgctgatccacatctacatcagcccggacgataaccccgccgaagccattgccttcctgcgggagaagtacactgccgccggcattgccaattccatctccaccacagcggtgaagcaggaggagtgggccactgcctggaagcagtattatcacccccagaagctgggcaatcgtctggtggtctgcccgtcctgggaggagtatgaaaagcagcccgaagaggtcatcatcactctggacccgggtatggctttcggcaccggcagccatgacaccacccggctctgtctggaattcctggaggagcactgcgctccgggcaagcaggtgctggatgtgggcagcggcagcggcattctggcgatttcgtcggtgctgctgggctgtgacagggctgtgggcgtggagatcgaccccacagcggtacgggtggcagaggagaacagcgccatcaaccacaccgatgaccgggtgcagttcatctgcggcgacctggtgcagaaggtggagggcgtctatgacattgtctgcgccaacattgttgccgatgtgatcatccagctgctgcccaatgtgggccgcttcatggcagaggacgccgtgctcatcacctcgggcatcattgacgagcgggaggccgatgtccaggccgctctggctcagaatggctttgcagtgctgcgccgccgggaatccgccggctgggtagccctggaatgcgcaaaggagaagtgacagtatgccgcggtttttctgtgacgccatagcgggcggcaaggcggtcatcaccggggaggacgctgcccatatcgcccggagcctgcggatgcagcccggcgagcgcctgaccctctcggacgggcagggcaccgattttgactgtgtgctggatctggtcacacctcaggaggtattcctcaccgtgctggagagctatccatgccgcaccgagcccagtgtctatgtacggctctacatggcgatgcccaaggctgaaaagctggagctcatcgtccagaaggcagtggaactgggcgtgggagagatcattccggtgctgacccggcggtgcgtgtcccgccccgaccccaagagctttgagaagaagcgggtgcgtcttgcccgtattgccgccgaggccgccaagcagagcggacggggccgcattccccaggtgcgggagatgatggacctgcgcccggctttagaggagatggcagcccgtcccggcgccatgctgttctatgagcgcagcacggctcccatgcgggaggtgctggaccggatcgaaggggaggcctccctgctcatcggcgccgagggcggttttgatgagagcgaggtggaactggcgctttcgatgggaatcccgtcgctgacgctgggcccccgtatcctgcggtgtgaaaccgcacccatggcagctttgtcggtgctgatgtaccataccggcaatatgaactgattctgataatatgaggtgacagccccatgaaaccctatacccatatcctgttcgacctggacgggaccatcaccgatcccgccgaagggatcaccacctgcgtgcgccatgcgctgcactgtcagggcattgaagaggaaaactaccagaacctctgccgtatgatcggaccgccgctggcagagggcttccgggatttctatgatatggacgaggaacacgcctggcaggcagtccgggacttccgggaactgtttgctaagatcggagtggagaagaatatcccctatcccggcatgaaggaggcgctgctgcggctccgggacgccggcaaggtgctgtgtgttgccaccagcaagccggaaccgttcgcccgggccattgccgaccggttcggcctggcagagtgctttgactttgtgggcggcgcttcgctggacgatacccgtaccaaaaaggcagcggtgatcgaatatgtgctggcatcggtgggttcgccggagccggaacaggtcctgatggtgggtgaccgccggcatgatgtggagggcgcggctgccttcggcatcgactgcgtgggcgtgctctacggctatggcagccgggaggagctcaccgccgccggagcctgcttcctggcagaacagcccacggacattgcggactatgtgctggggaagtaagccatggcagtacaggagagccttcgtccccagccggtaaaaacaaccgaccagcggcgtccggtgcgccaggcgctggcagccacggcagcttcgctgggcctgctggcaggggtcgtggcggcaggggcagccctgtccgggacctggtcggtatcggcagcctggaaccgggcggtggcgacagtcacagccctgccggaataccgggtggcgctgagcctctttgaggacggcagcagcgcggattttgcccgggatcttctggcggcggaactggattctgccgccgtgggggagagcctgtttttcctgccggtccgggacctgctggaaaccgcagcggcctttgagggggtcggtgtggaaggggtcaccctggtggaaggcggattcatggcctggatcagcggcggggaagaggcggtccggcagacagccgaacggctccggcagatggctgcctatggggaagtgcggctggaagccgacccggaagaccctggtatcacccggctctattgcctgacagccggagcggaagaggaggaatgacatgagcagtcggatttatgcggcagaagacgacgacaatatccgggagatcctgcggtgtacgctggaatcctacggctatgaggtagaggtgtttgaatcggcggcgcccatgctggagcggatgcgccagcagctgcccgacctggtgctgatggacatcatgatgccggagatggacggcatggaggcgctgcgccgcatgaaggagagtgtccagacccgggaagtaccggtgatcttcctgaccgccaagtccagtgaggtggataaggtgcgggggctggatctcggcgccgaggactatatcaccaagccctttggtctgctggaactggcggcccgggtgcgggcggcgctgcggcgtcagccggcggaacaccggcagcaccggctcaccggcggggatctggtcatcgacctggataaccatgaggtcacccagagcggacggcacctggatctcacccttaaggaatatgagctgctgcgcatcctgctctccaacagcagccgggttgtgccccgggacgagctgctcggggagatctggggctttgactttgtgggcgagacccgcaccctggatatgcatatcaaaaccctccgggccaagctccatgacgatgtggagaatccccggtatatcaagacaatccggtcggtggggtacaagtttatcggctgaggaatgaggcaatgatggtatggattggaatatgctgattattctgctgggcggtatgctgctgggagccggcggcatggggctgtttttgcgtcgccgtccgccccgggaacagcagtatgcccgggatatggcaatgctggcggaccgtctggaacagcttccggcggatggggaacacccctttgtgaccatgccctgtcagggggatacagcccgggtggcagcggggatcgaaaaactggcagatgagctctctgccacccggcagcgggtggagaaggagcgccgcaaggcatattatattctggacaacatggacagcggcctgctcctggtggacggcagttttgtgatccgccagtgcaatgcctcggcctataagtacctcaccgggtgtgaggaactggtggacgctcccctgtcggaggcctgtgatgacgaggggctccgcaaggcggtgcgcaatgccatcaccaatgaggtatccaccgtgctggatctggacctcaccgcccggaccggcaccatcgtatccgcccgggtcacaccggcggtgggatcgctcttcgatgctgaaaaccagatctcggctgtgatcgtcctcaccaatgtcacccagtcccggcagatggaggcacagcgccgggaattcatcgccaatatctcccatgagctgaaaacccccatcacctccattctgggcttcaccgagctgatgacctccggcgtagtcaccgatcccatccagaaggcacagtatctggagcgcatcggggaggagggacggcggatgtccaacctcattgacgatattctgcgcctgtccagtctggaatccaaacaggccgaggaggtctgggaacgggtggatctccgggggctgtgtgaggacatcttccggtcgctggaacccatcatgaagaagcggggcatcaccggggagatcttcggagcggcccattactatgcctatcccgatgatatgcgccagctgctcaagaatctgatggaaaacgccgtcaagtacaaccgggaaaacggacgggtgacagtgcggatctcgccggacgcctatcagtgtgtgatctcggtggtggataccggcatcggaatcccgctggagcatcagtcccgggtgtttgaacggttctaccgggtggacaagggacgcagcaagcgggagggcggcactggtctgggcctttccattgtcaagcatatcacagccaaatatgccggtcagatcacgctggtctcccgtccggacgagggcaccagcatccgggtgacactgccggttactgaggagggacgaagatgagcgaaaccaaagcagcggaactgcgcacctacacctatgaggaactcgccggacatgatgtctatgagctggctcattccggctggaccggggaggtctactggagtgaggattccctctatctcaccgacgatgacgatggcctccccatgctgctgcccctgttctatgaggggccgatcccggattttaggtgggatgcccccaactgcatctccctctatgactgggcggagatccggcaggaggcactggacaaggacgctgcctgttttgagcggctgttccgggagatcgatgcctggctcaccgaagaggatcgccaggccgggtgtttctggattctgggcatctgagcccgccgccgcataaaaaagagccgccggacacggcagacgggaagagcttcccggtcgggtccgacggcttttttctgtatttttgggggagcgggtcagtccaggacagccagttccacaccggtgtagtaatgggtgaggatctccttgaagtccgccccctgccgggccatgtagtcggcgccgtactggctcagtcctaccccgtgcccatagccctgggtgtggatggtgaagagatcctcggcgctgtcatagctgatggcaaagctggcagagcgcaggtccagcgccgcccgcacctccttgccgttgacggtgagattgcccaccttgatgtccatgatgtagcccgattcggtatagctcaccggcgagagccacagggcgggattatcccccagcaccagcccgtcaaaggcagcggtgagcagggcacgcatctcggcggaggtaaaggtcacttccgcttcggcggcaggggccaccaggtccccttccgactccaccggcaccaggtagggaaccgaggcctgccagacattctccgctgactcggtgaccccgatgctgcaggagtgatagaccgcctggatgggttccccgtcatagagcagcacatagtccatgacgctgtcggcggcggtggtgatcttgtcccagtattcgtccgccatattgccataggtggctttgatgtcctcagcccgggcatagcccttgagatggtcggggtcggcggagaagtccgcacccttcagggccgggtcgggattctcccgctgggtcagggcacagtgcagagcccaggtatgggctgccactgcctgggctttcatcgcctcggcatggaaggtagcgggcagttccgctgccaccgctccccggacatagtcccgcaccgagactgtttccacctgcccggtggcagcgttgaggattttgaactcggtgatgtccagaggactgtccgccgggagcatgacctcctcggcctgggaagcctgggaggacggaacagattccccgatccagccgagatcctcctcatcggcggactgaggggcaaaggagggcagggacagggccgggaatttccccagagccagaggcggcagcagcagagccgccagcagaaagacaagaaccggcaggattcgttgacgcatacagcagcacctccaaaaatttcgtaaaaatattgggaaactttgagtatacaaacccggcgcaggtgtggtataatcttaaactgtgattttgaaaactgtgatggttcattcacagattgaaacgagaaaatacggtgcctgtgggcgggtggatctgtcttaaagattatagcctcccacaggcatctctttttgcagaaaccagtcgcacagcagggcaggtcagcacagggaaaggcggagatcggcagtgaaaatcggatttgacaacgaaaaatacctcaaaatgcagtcggaacacatcaaggagcggatcgctcagttcggcggcaagctctatctggaattcggcggcaagctgtttgacgatttccatgcttcccgggtactgcccggttttgcccccgacagcaaggtgaagatgcttctccagctcagggatcaggcagagatcgtcatcgccgtcaatgccggtgacctggaaaagaacaaggtccggggggacctgggcatcacctacgatctggaagtgctgcgtctgatcgatgccttccggtccatcggactgtatgtgggcagtgtggtcatcacccaggatcagggtcaggccgctgccgatgccttcaaaaagcgtctggaaaccctgggtgtgccggtgtttctgcactatcccatcgcaggctatcctgccaatatcccgctgatcgtcagcgatgagggctatggacgcaatgactatatcatcaccagccgtccgctggtggttgtaactgcccccggcccgggcagcggcaagatggcaacctgtctgtcccagctctaccatgagcaccgccggggcatcaaggccggttatgccaagtttgaaaccttccccatctggaacctgcccctgaaccatccggtgaacctggcctatgaagctgccaccgccgatctgcaggatgtgaacatgatcgacccctaccatctggaggcctatggcgtcaccaccgtcaactacaaccgtgatgtggaggtattcccggtgctgcgggccatgttcgagcgcatcctcggcgagagcccctaccagtcccccaccgacatgggcgtcaatatggcgggcaactgcatctttgatgatgaggcggtgagcgatgcttcccgtcgggagatcgtgcgccggtactatcaggccatgtgtgacctgcgcaccggtcggggcgaagagagcgccgttgccaagatcgaactgctgatgaacaaggcggagatcactgtggacatcaatcccaccgtggctgccagcctgcgcaaggcagaggagaccggcatgccggcagttgccattgagctgccggacggacaggtcatcaccggcaagacctcatcgctgctgggcgcgtcgtcggcagccctgctcaatgccctcaaggtactggctggcctggacgacagcctgcatctcattgcgccggaggtcatcgaacccatccagcacctcaaggtatcgcatctgggcaaccacaatccccggctccataccgatgagacccttattgccctgtccatcagtgcggtgaccgatcccaatgcggaacgggcgatggaacatctggcagaactctcgggctgtgatgcccattccactgtgatcctctcccaggtggacaccgatgtgttccgtaagctgggcgtgaatatgtcctgcgagcctcgctatcagaccaagaaactctaccacaagcggtaagctgctgatccgggactgtcccctctgaagggacagtcccggattgttatacccgggtaaaatttcaccgggatatttgcaatttttacgctttcattgtaaaataaaaactgtcagaaaacgggtaatccgaaggaggtttttctcatgaaaaaacttggttttggctgcatgcggctgccggtgctcgatccgggcgatgtcaccaccattgatatgccgcagtttgaaaagatggtggataccttcctggagcgtgggttcacctactttgataccgcctatgtttaccacagtgtcaccagtgaaaaggctgtacgggaagcactggtcaagcgtcacccccgggacagcttcaccctggctaccaagctgccgctgattaagctcaaggaagctgcggatatggacaagtactttgccgaacagctggaaaactgcggtgtagagttctttgattacttcctgctgcacaatatcaattccggtacctggcccactgtccagaagctggatgccttcaactggctgcgcaagcagaaggctgacggcaaggttgtgaatatgggcttctccttccatgacagcgctgatctgctggaagagatcctcacccagaacccggatatggactttgtacagctgcagatcaactatctggactgggagaattccaccattcagtcccgccgctgctatgaagttgccaccaagcatggcattccggtaatggttatggagcccatcaagggcggcaccctggccaatgtctgcgaaaaggctgagaagatgttcaaggaccatgagccggagctgtcggttgccagctgggcgatccggtatgcagccagcctgcccaatgtcaaggtagtgctgagcggtatgtccaatatggatcagctgctggacaacactgcctatatggcagatttcaagcctctcaccgaggaggagcaggagatcgtacgcaaggctgcggatgccatcaatgaatccattgccattccctgtactgcctgccgttactgtgtggatggctgccccaagcatattgccattcccgagtacttcactctgtacaacaacatcaagcagtccatcaacaagggctttgcgatccagaccctctactattcgaaccttgccaagactcatggcaaggcttcggagtgcattgcctgccgcaagtgtgagaagagctgcccgcagcacctcaccatcgtggactacctcaaggaagttgcctctgtttttgagcagtaagacagcagactgcaaagtttg

SEQ ID NO: 4516 - DNA, 14340 bp, Unknown
  16S sequences of unknown bacteria
ccttggcaaagttcacatccaccagcatgtaagcggcggcgcacagcaccaccagagcgcccatgagcagcagcttgcgccggttggcgcggatggcggcggtattcacggctgattccccccttccaggctggaagcgctctgcgcgcaaggcccgctatgggccgggcccaggcgaatggctttgcggccatgcttgagccggtaaaagagcaggccgatgaacagcaggctgccaaggatgcccacgatcagttcaatgggcagttcatagggcgcgatgaccacgcggccaatcatatcgcacgccagcacgaaaatggccccgaacagcgctgtatccagcagcgaaccgcgaattttgtctcctttgaacatggccacgatgttgggcacgatcaggccgatgtaagaaatggagccgacgatcaccacgatggccgcggtgatcgccgcggcgatggaaaggcccatgaacagcaccggcgtgtagcgcacgccgaggttttgggaaaaatccttgcccatgcccacgatgttaaaatgattggcgaagaggaaggccaccagcaccagcggcaccaccaaatacacgatttcatagcgcccgcgcaataccagcgaaaagtgccccaccaaccaggaggaaagcgcctgcgtcatctcatagcgataggccaggtaattggtgatgccgccaatcacattgccaaacataatgcccaccagcggcaccatcacaacatccttgaattggatgcgctgaatgaaccaaacgaagatccaggtgcctgcaatggcggcggcaaaggcgaaaaacgcgcgtccccacagcgtggaaccggggaggaacagaagtgcgagcaggatgccgaattgcgccgaggaaatggtcgcccccgtggtgggggaaacgaatttgttcatgcaaagctgttgcatgatcagcccagccacgctcatgcccacgcccgtgcacaaaatggccagcaggcgcggcaggcgggaaatcagaaagatgcgcatggcctccccatcgcccgagaggagcgaagcgaaatcgatgtcgatcacgccaacgaatagagaacacacgctcagtacagccagtaggcttgccagcaaaacgctcgataggtgctttttgatcgcggacgcctcctttttgcaaattagatataactaacgcttatgtatataataattagcttacactaactcacgcccaagagtataccacagatttctcctacttgataagaaaaaaatgcgaaaaatttcaacaaaagtgtctctccaaaaatgaaaaaattgctttcgccatatgcgccaatcatccaaaatgctttcgcatgcttaaaattcctgcgcatcggccttgtctcactcgattcgtgcccttcaaaaaaatcttatacggctgcctttctctcagataaacgggattttcaacattgcggcagcgcgtttttcacacagatgcgctatactaagcaactgaggtgataaaaatgcattccaacaaatccagcacgcgccaattgtgcctggccggcttgctgacggccgtcgtcatggtgctgacgatgatccgcctgcccgtgcccatgacggagggctatgcgcacatcggcgacgcggccattttgctgtgcggcctggtactcggcccgctaggcgcggttccggcggcgctgggcagcgcgttaatcgatctttatggctttgcaatttacgcgccgttcaccctggtgatcaagggcgcgatgggctttttcgcgggcaaattcctcaaaagcggcctaaaggtgaaaaacatcgcgatcgttatcgccatttcggcctttatggtgcttgcatatttcctgacggatatggtattatatggctgggccacggcgctgggcagtgcgctgggcaacgtcacgcaggcactggcgagcatcgcgctgggctgcgtagtgctcgcgctgcccgtggaccgcatccggggataaactgccagccgctccttccgcggtgggaggaacaataccacaaggagaacaagcgatgcaaaaccaacgcctacaaaatatggtgcgctgcgcgctggcggcggccattttgtgcgtgaccgcgcaaatttccctgcccgtgggcgacgcgcccatcaccatccagcccttcgcgctggcgctggtgggcgggctgctgggctggaaatggggcgcgctggcgggattgatttatgtggcgctgggcgccatcggctttccggtgttcgcgggcctcaagggcggcatcggcatgctggccggggccacggggggatatttgtggacctatcccctgctcgcgctgggcgcggggctgggcaaaaaccgctggcaacgcgcgctgttttcgctatctggcctagccgtgctggaaatcgtgggcgcgtgccaactggcgcatttcaccggcgcgcccatctggccctatatcgccatgtttgtgcccaaggatatgatcgtggtgctgctcgccgtattgccggcggaaaaaatgaggaggatactcaaatgggagaaattttgaagcgcagccaggtgcccgtttccgacacctggaacacgaaagacctgttccacactccgcaggactgggaggaagcctacgcgcaggtggacgcgaagatcgcgcaactgagcgcctaccagggcaagctgggtgaacctacggcgctgaaagaagcgctgcacttgctcacggacacggaagtgctgctttcgcgcgtgtattcctatgcgcagcgcaacctggatgtggatagcgccaacagcgagttccaggcgctttccgcgcgcgcgcagagcctgtacgtgcgctacgcggaaaagagcgccttcatccagcccgaattgctggaacagagcgaagaatacctcgccgccatgcgggacgacgccgccctgggcgattaccgcatgatgttcgataacctgatgcgcaaccgcgagcacacgctttccgccgaaatggagcagctcgtggccatgacgggcgaaatgggcaacgcaccgaacaacatctatggcatgctcaacacgctggatatgaagttccccgtcatcaaaaacgatgaagacgaaaaggtgcgcatcacgcattccggctttatcccgctgatgatgagccacaaaaaaaaggtgcgccgcgccgcgttcgaaggattgtatggcacctaccagaaattcgaaaacaccttcccggcgatctaccaggccagcgtgcagggcgacgtgttctatgcccgggcgggcaaatttgcctccgcgctggaagccaagctgttcccggacaacgtacccctcgcgctgtatgacaacttgatcgcggccgtgcggcggcacgtgggcggactgaaccgctttgtttccctcaacgcgcgcctcaacggcatcaagaaacccagcatggtggacgtgtacgtgccgcccaaactgggctttgacatcgcgctggatttccgcgaggcttacgcgctggtggtcgattgcctgcgcccgctgggcgaggattatcaggccgtgctgcgccgcgcgctcgacgagcgctggatcgacccctacgagaacgagggcaagcgctccggcgcctattcggcggacgcttacggcgtgcatccctttgtgctgatgaactacaagccggatctggaccacctgctgaccatcgcgcacgaaatgggccacgccatgcatagctacctgagcaatgccaagcagcccgccgccatggccgattactcgctatttgtggcggaggtggccagcacctgcaacgaagtgctcgtgctgctggagctgatgcagcgccaccccgaaggcgaggccttcctgctctacacgctgctcgatagcttccgcaccacccttttccggcagacgatgttcgccgagttcgaaaaggaatcccaccgcatggcggaggcgggcgaaccgctcaccgcgaaatcgctcaacgccgtgcacgcccgcctgaacgcggaatactatccctcgctagaacagcccgaattgatcgcctacgagtggatgcgcatcccgcacttctaccgttcgttctatgtctacaaatacgccacgggcttctccgcggccatggccatcgccagcaaaatccgcaaagaaggcgcgcccatggtgaagaaatacaaggatttcctctcggcgggcggcagcgtgtacccgatcgacgcgctcaagctggcggatgtggatatgtccaccggcgaacccgtggaacaggccttgcaaatgttcgaatccctgctcgaccgctacgaaaccgtggtaaaaggcaagtaattgccactgtgggccgcctcaaacgaggcggcccacaatgctatattccaattccaaaatagcagcgaaaaacaaacttccgccgcgctttcatcgctctttttccagcatcttttgaatcaactcccacgcttccgggggatcggagggcgcgggcgcgaagccataggtttgatatatgtgaattgccgggtagctccaggactgcgtcaccaaaaatacgcgcccggtaaggcccaactcatcgtaccgacggaacaggcgcgaaagcatcgccttggcaatgcccttgccctcgtgcgcgggcaatacgcccacccagtggatccgcgccagggattcgccttcccattcgctctgccacaaagtggcggtggcaaccgcgtctcccgccccatcgcgcacaaacagcatgcgttcccgggtgagcggcaggttttcgcgaaattcccggaagcactccagcgcgcgctcgcgcaaatccgccatgcccgtttccaccagaatgcgcgcccaatcctcttccatgccgtccgcataccccgcgaaggcgtaccccgcgggcaacgccgcgccgcgcggcgcgcgctggggcgcggcgcacaccatgttcaccgaataatagggaatcgatttgtccaggcccataaatttccctgatcctttctccgcgctgcccacacaagcgctatattgcccggtgtcccaggccgatggcgacctcgttgaactgcagtaggccaatgccgaaaaacacggccaccgccacgttgttgcccgaacgcgcgatgccaatcttgccgcccacgctcaggccgatggccttggtggtcacctgcgagagcgcctctcgggtcgcgcccgccacggagccttcctcgcggtattccgtggtggaaatcacgccttcccgcttggccgccaccacagcgcgctccaccacgcgggtgatcgcctgcaaaaaatcgccgccatagtccaccgccgcggcgcgcacatcctcctgcgcgaactgctgcttcatttcgcgctcttcttcgcgcgagcgcgtcaggcacatgatgatcgcggcgcgcgataccgttttgctgccgctgatgttgttgttatcgagcaagctaaccctcctttgccgccgaagcgcccgccaacgcgcccgtggaaaacgcgatttgtaaattaaagccgccagtcagcgcgtccacatccagcacctcgcccgcaaaatacagccccggcaacaggcgggattccaacgtggagggattgacttccttcacttgcacgccgccgcgcgtgatcaccgcttcttccatgccgcgcgttccctttaccgtgagcggaaccgccttcatcagcttgaccaattgcttgcgctgcgccgccgtcaccgaatgcacgggcatatagggcgatatgtccgccaggcgcaagagcatctgccccaggctgtgcggctccagcccgtccatcaccgtgctgatttggcaattcttcgccgcggcaaagtccctcagcaggcgcttatccagcgtaccctcatccagcgcgggcttcaaatccaaggaaagccgcacttcgccttcctctggcagcaggctggaaagcgtgagcaccagcgggccggaaatgccaaaatgggtaaacagcatttcccccatctcggaataaaagcgcttgccgcccgctacgcacgcactgaggcgcacgttcttcaggctcaggcccatcagttccgcgcaccacgattccttcgtctcaatgggcacgagcgcgggccggcatggcacgatcgtgtgccccgccgcgcgcgccagcgcgtaaccatcgcccgtggaaccggtggaaggatagctcgcgccgcccgtggccacgaccaccgcgtccagagcgagggattccccgccttccatcataacgcccgccacgcggccattttcgcaagaaatgctctccacgcgcgcgccaaagcgcaccgccacgcccagccgccgcagttcccggctgagcgcgcccgtcacatcgctggccttatccgaaaccggaaaggcgcggtcgccccgctccaccttcatggggcagcccagcgattccaacaaatccaaaagttgcaagttgctcaggcgggcaaacgaggcgtacaaaaagcggggattgcgcacgatgttcttgaaaaacgcctctttgtcacaggcgttggtggcgttgcagcggcccttgcccgtgatgtaaatcttcttacccagtttttcgttccgctccaaaatagtaacgcgcgcgcccgcgcgcgcggcaaatagagcggcgagcattcctgccgcgccgccgccaatgattcccacgtgtttcatgcttccgaaccctttcccaaatacaccttatattccgaccaaatgccttccaactggtcgaaatactgcgccacctgctgccgcctgcgctggcccaaagccacgatcaacgcattgatcagcgaaagcggcgcgcacagcgaatccacaaacgaagccatgtcgctcttggccatcaggcacagatccgccacggaatgcagcggggaaagcggcccatcggtgatggcgagcagcgaagccccgcgatttttggccaattccatcgcttccaacgtgcgcgaggtatagcgcggaaacgatatgccgatgagcaagtcctcatcgttgatgcgcatgatctgctcaaaaacgtcgctgatgccggaggtgaccagcgtgacgttgggaaatatgtatttcaaataatgcgataggaactgcgccagcggcgcgctcgcgcgcagccccagcacataaatgtgccgcgcctgcaaaattttgtcgatcgccgcttcaaacacgtggatgtcgatttcgtccatcgtcgcgcggatgttttgcatatccgccttgagcaccttggccagcacctgcgaatggtccatatccgaggtcatttcaaaccgctgcgacgccgtgagccggtgccggatcaattcctgcagcgccttctgaagctgcggatagccctcgtatcccagcgcggcggcaaagcgcaccaccgtggattccgaaacgcccacatattgtcccagcttggacgccgtcataaaagccgctttatcataatgttgcacaatgcactcggcaatccgccggtggctcttggacaattttttcccgctctgattcagcctcgcaatcaattcctgcgtgttctccatggcagccatttcctccaactaccagcgctctgccgcgccagtcctctacacttagtataacgcatttatgaccaatttgcaagccaaaagtgggcatttctcatttttctatattaagaagcgcattttgcttagaaatacgcattttttgagcgctgcaatatcgttttatgcaggcgtccgcccgccatccgcctccgcaagccgcgcgcgcaaaaacgccgcgcttttgcggatcgctccctcttcataggcgccgtgcagcaccatatccccctggtagcccacgcgcgcgaggctttgcaaaaagaacggaaaatccacgataccttcgcccgccgggcaaaaatcaatgcccgccgattcccgaatgtccttgccgtgcgcgagcgcgatatcgctccccagcagcgcgaacgcctcctctatggtttcgcgcacaaagcggggatgcgccctgcccacgtggaagaggttggcgcaatccatgatgatcttaagcgaatcggatccgcacgcgtctaacagatcccgcgcgcgccgcggcgtattcaccacgttgctcgcttccacttctacgcccagcacaaggcccagcgcgcatgcctggggcaacagttgctccacgccttccagcatatcgcgccacgcctgggccgagtcgttctccggcgaaacttgccacagcgaatcgcggttgcgcgtgcccgtacacaaagataccatgcccgcgcccagttccgcggccgcccgcgcgaggagcgcgaaacggcgcgcgccttcttgtcgcaccgccgcatccggatgggccatgttgtaggtgccgttcaccgccacaatttccagcccataacgtcgcgcgcaatcgcgcgtcagccgcaccgtttccggcgcgatggcgggcggaatttcccaatcgccgcgcgccgcgtagccggattccacaagcgaagcaaagctaagctgcacgcattcaaagcccatttccgccatattccgaaacaacgtttccgcctttgccggcgcaaagtccgttgtgcaaatgcccagccgcatcttattcccctccgcccaccaattcttacggatattataccagatccccgcaccgttggcaacgcatgtccagcaaaagatggagaaaaatggctccgcgaaaaacagcggtgggaacgaagcagaggaaagcgtccgcaaatatcctgctcctgccagtacagcttgcccggttcaagtggttgcggtgactttattcgaacggtttcaagcgcctttcccccttggtcttacatctattatagcgctacaatttgttgtctataaagcgcaaaatcgcgctttacaaaaaagcgaacctgtgctatgatgaatgtaaagagaagagcatccccgcgaatcttacgatgcggcgagcccatgcccagggagagatccgaaagagacggggagttcgtcttaggatcatggaaaggaagaggttttcatgcgcaagttcgttctgctgctggtcttgctgctggcgcttcccgccgccgcgatggccgacgattcccagttcatcgaacacgagccgttcgcgctcgacgacagctgggtggagggctccacccgccccggcgaataccactactatcccttcatcgtcgaggaagtgggcctggtgaccgtgcgcgtgcaaatgttctgcggtggccacgtggagctgctcgacgctgatctcatcgagtgggacgagggctacttcaacggcaccatcggcgcgccggagacgcaggacttcgtctactatctggaaccgggcgtctattgcctgcgcaatggcagcgacaattcgcagggcgacttccgcatcaagggcatcttcgagccctgccccagcaccgagaccgctgagagcgacgattacctcggcgcgcaggcgttgccctcgggcgagacgctcagcggcgtgctcaccgagtgggacgggcacgatttctataccttcacgctcgacgcagaagagcaggtctatctcaccgccaataccacgctggagagcctcatgcccaacctcacgctctacgacggcgacatggtgaagatgtcggaggagtacggcttcaagggttatgccgaggagttcctcctgcccgccggcacgtattatatagacgtgtggggcaacaagggcccctataccctcaaggccgtctatgaagaggatctccccgcgaccgtacccgccgaggaagcgaccgaggaggaagtggatgtccaaaacgagagcgactctttcgacaccgcacccgaagaaggcttcaccgatcccgacagcttcacggaggagcttggcagcctgctgttcgacctgctcgacagtttctaacagcgccagtccaaaaacggacagggccgtccacgcaagtgcttgcggggcggccctgcgtctgtcatcgcacaaatcccccatcccctgcctgttctccctcgcctgccatgttgcccacgcccgacactcgtacagcccgtacaatctccggcaaaatttgcgcttgacgcagaaatgcaaatgtgctatcctttgtgtagaatgccacattctagcaacatacaggaggaatgcgtatgtccacctatcagatggtatctcatgaacagatcaagcttgctcccggcttttggtacgaccggcgcgaactcgcgcggaaagtatcgctgatggccgtttaccaccgttttcgcgacaccggccgcttcgacgcctgggattttgcctggaaagaaggcgatcccaaccgcccgcacatcttctgggacagcgatatcgccaagtggatcgaatccgccgcctatttgctggaagaagaagaaaatgaagaggttgaactgatcatcgatgatctggtagacaaactggaaaagcaccagtgggaagacggctattttaactgctatttcggccacctggcgccggaggagcgcttccagcactacaccgaccacgagttgtattgcctggggcacctgctggaggcggccattgcctataagcgcgccacgggaaaggacaaaatgctgcgcctgctcatccgctatgtggatctggtggatcgtgtttttcgcgtggagcattcggcggctttcgacacgcctggccacgaagaaatcgaattggccctctttaagctctatgaagagacccacgaagagcgctttttgacgctgatgcgctatttcatcaacacgcgcggatgcagcgagaaagaccgcacttacgatatattcgaaaacaatcccgcctacgcgcaggcgcacctgcccgtgcgcgaacagcgcacagcggaagggcacgccgtgcgcgccacatacctctattgcgccatggccgatttggcccgccaggacaaggacgaagcgctgctcgaggcctgcgacgcccttttggataacatcgcccacaagcgcatgtacgttaccggcggcattggctcttcgcacatcggcgaggccttcaccgtcgattacgacctgcagaaccgctcggcttacgcggaaacctgcgcggccatcggcctggcgctgttcgcgcggcgcatgtcgctgaacattcccaagcggctgtacgcggacgtggcggaactggcgctgtacaacggcatgctcgcaggcgtctcgctcgacggcaaatcgtacttctacgaaaacccgctggaagcgcatcccgaactgttccacctgaacgaacgctatccccgcttaaaggagcacatgcccattttacagcgcaaagaagtgttcgattgctcttgctgcccgcccaacctgctgcgcaccattgcttccatcgcggacttcgccctctccgaagacgagcgcgaggtctatgtccaccattacatgccctgcgaggcgcaaacccgctttggcacgctcaccatggaaaccggctatccctacgatggcaaaatcgcgctgaccgtcggcttcgatagcgaagtcaccatcggcctgcgcatccccggctgggccaccgcgtacaccttgcaggtcaacggccagccctacaaggccaccctgcgcaacggttatgcgttgatcacgcacagttggtccgcgggcgacaccatcacgctggatctgcccatggaagtgcggctgctgcgcgcgcatcccgccctgcaggaggattgcggccgcgtggccgtcatgcgcgggcccatcgtcttctgcgccgaaggcgtggacaacggcgcccacctcaaggacatcgccatccggccgtccatgcccttcacctacgcctggaacgaagccttgaacgtgcccatgctgcgcaccacggcgacgcgcagcgtctggccggaaaagacccgcatctacaccagcgacccggtcaagcgcatcggcgcttccctcacgctgatcccctatttcgcctgggccaaccggggcgaaagcgaaatgctcgtctggctgctggagcgcgagtaagctgatagcgaagcggctttcgttcagaaacgcgagagtggaaagcggttcccaacgggccgtttccgctctcgcggaatcttggcagcaaaacgcccaaggaggcagttatgaaaagagatttgtcaagggtgttttatccgatgttttttctatcgaacacaaaatagctgctcattgaatctatttttacaagtagctattttatatttggaggaattcatttaataaatcacatatagaaatttcatactaattagattgttcttgcaaagagatatatgctatcataaataagaagaaacttagttgaagggtgaatatcgattcgcccagacagtaaagatgatttcaactttacacgaattttatagctctttatatacactcaacgtagaaacgaggtagttcgatgaaaattttgattgtagaagatgaagaaaagctgcgcaactcccttgcagaagggttacgtttgaaaggatatgctattgatgtagcgggagatggagagagtgcagatgaaaaggccttttatgaaagatatgatctcatcattctggacctgaatctacccaagatagatgggttttctgtactcgaaaattttcgtaaggaaaatttggatgttcctgtgttgattctgtctgcccgtgatgggattgaagacaaggtaaaagggctggatttgggagccaacgactacctgactaaaccttttcattttgcggagttagaggctcgtgtgcgctcactgctacgtaggaaaacagtgatcgaaaacactgttttgtccagtgggtctctttgttttgacaccgcatccagaatcgtaaccgcagcggggcatccagtctctctgactacgaaagaaaatgccctattggagtatctgctgctgcataaaggacgagtaatcaaattagaagaactgatcgaacacgtatgggacagtaatgctgacaccttttctaattcagttcgagttcatatgtcctccctgcgtcggaagttaaaaggacagttgggatatgatcctatctgtaatatcatcggcgaagggtatgtgattcgtgagggaggaagcgtatgaaaagaagtatcccgttaaagctaaaactaactactatttcagtgtgtattttaactgttatgtgtgtggcgtttgcaatctctactatttactcaaccaatgggctggttcaggccaccattactacgccagcgatctctgttgatgaaagtatgccggcaataacatcggagccctctgttgcagtcacggaagctctctggcaatttaggggaacaaccgtgttggttatgttctgtcttattgcgataggttctgctttaacctatctgtttgcttccagaacacttaagccattggaagaccttacagagagagttcaacatattgacattcacaatctagatgagggtgtctcaattccacaaacaaaagatgaagttgcaaagttggctcaggcgtttcaaaacatgaccgagagactcaatctgtcctatcaggtacaaaaaaatttttctgctaatgctgcccatgaattacgtacccctctcgctgcgattcaaacccagttggatgtatttcaaatgaagccagatcgaaatcctgaggaatacacaaatttgctccaaagtattggagaaagcacagagcgtctttccaatctggtaaaagatctgctcacatttacgaacgaacaagggataggaaaaaaggaaccagtagagttgagacctttgcttgaagaaacggtctttgaacttgaagaatatgctgctactaaacaaattgaaattacgatttctggccaaggaacagtgttaggcgatgacagtttgttgcagcgagcgttttttaatctgatctccaatgcaatccgctacaatgtagattgcggctccattttcatcgaaataacagatgctcaggtaactattgcagataccggtatcggtattcctgatgaggctaagtctcatatttttgacacatttttctgtgtagacaagtctcgcagtcgagaactgggtggcagtggtcttgggctagccattgtaaaaagtattatagaaaagcataatggatacatttatgtgaaaaacaatcagcctcaaggcagtatatttatcgtaggctttaatggtaatatataaagaaaaggacagaattgcactacgaaggaaatatctaatgagagaggacgccggaagaaattcttccggcgtcctctcagaccactgacaaagcccgtttcaagaagtggaagacgggctataagcctgagc

SEQ ID NO: 4517 - DNA, 4241 bp, Unknown
  16S sequences of unknown bacteria
caagggagccgtctttgctgctcggcatacaaccagccaccccgagtggataacaaaaaactcccccgatgggggagtttttttgcttttatctcagttctatcatccagcgcggaagcgcagtttggctgtcccgacacgggaccggcccaaaagaaaagtctctgtccgagataagtattggtgaacaaaaaatatacattttcacagataattatgcataaacagaattgttgctgacataaaaaactatattcccttacaaaaacaattttgtgggggtactttatgtctgattttaattcaacttattttggaatgagacaaatagaccgaagtatgctataatatagccatagttcggaactttttgctgttcttttcgtctatatagacaaggaacagttagacaaacttgtatttgacaaaggagtgtgtttgtatgaaaaagaaaactgtatccatagtgttgtttttgattgcctttatttcaacttatttgattatttgctttgcaatccctggcatgagaattaagttagaagcagaaccgatagaaatattctttaagagtatcacccatatggtgtttttcaaaacgatgatatctcttgtcgttgcaattatatttggtgcaattcccttgttttttggaaagaagaagtaagccaattccaattagttgaactgaatagtatatcccataggaggagcaaggtcgatacaccttgctccttttcattgggcattcataaaaaatgaataaaaaggtcagttatgcataccaatacttatctcggacagagacaaagaaaaagccctcctgagaaggaaagcttttttctttgcacgctgccaggattgcacaatagccccttccggcggagccggagcatcgaggccccgggcccatacagccggggagagtatgggtgcagcgtcacgctgccaggaacggccgtcccgacacgggaccggctcgccgcgcctaccgtcttaatgcctttggataatggtttttggcctggccgccggagaccttgctccagcccagggggaagcccaagatgcgcaccggctgccagccgttttccccttgccaggggatggcctcgccccggagaaatgcctccgcccggctgtcctccaaaaagagggccaccccgttttcgccccggggcagagccagagccagggcgtgggccggctccagccgtcccttccgcaaagtgcccagatgcagcccgggccgcagcacccgcagccctttcagctggggcgtgccctccggcatctgataaagctcgctgccaaacaggcaaagccgctcttccttctccggaaaatccggcagggcgctctggcagaactccagccattcccggggtgccttcacccccggctcttccggcagaagggccgccgccccttcccctgccttccgcagctttgccatgaaatgcccttcgccccggattttgtggggccagagccgggcggttttccgcagttcttccccgccccccagaaaatccggccttccccggtcaaagccggggaaaaagcaggcgtcctccagggtgtagtcgtgattctccaggaatgcggccaccgtgccctcgttttcctccggggcaaaggtgcaggtggaatagaccagcaccccgccgggggccagcaacgcatcggcctgctccagaatctccatctggcggctgtggcacaggcggatgttgtccatgctccactgctccagagcggccgggcttttgcggaacatcccctcgccgctgcaaggggcgtccaccaccacccggtggaaaaagccgggcagatgccgccggagatcctggggggccatgttgcacaccagggcgtttgtcacccccatgcgctccatgttctggctgagcaccttggcccgggcgggatggatttcgtttgccaccagaatcccctggttttccatggcggcggccagataggtggccttgccgccgggggcggcgcacagatccagcacccgttcccccggtctggccccggccagcactcccacccccatggcggaaggctcctggatgtagtaaaggcccccttcgtggaagggatgcagcccgggccgggccggttcttcgtaataaaacccttccgggcaccattccaccggcgtcagaggaaagggcaaaacctcccccagctcctggggcgtgattttcagggtgttggcccgcagggccagatgccgcccctcctgctcatattgggcaaacagctctccggcctcctcttttcccaggaaaccttccatccgttctttgaatcctaccggcagctccatggttcacatctctcctctctcggcctgaaccaatgcaataaagaaaaatatgggtccagcgtgacgctggacccgattatagcaatttaagccccctggatcacttcgcccggctcgccacacgctgcaagggcttgcacacggccacggccaccacggcggcggccagcatttccagcaggcagttgacgccgatgagggacgccagcaccgccttcaggggcagggactggaagagcagggacagaagcaccagcaccatcatggagtggcagaaagtagccgccacggcgctgatgcccatggacagaacgccattcttgatctttttggaaagcagcaggtagagcccaccggcgatgacgcccagcagaatccgggggatgatgcacatcacaatggagctcaccggctcaccgctgaggaagggagagaaggccatatccgccgggctggccgcggcggtggacgccttaatcatgctgaaaatgccgaagctgaggcccaggatgcccccgtccaccgggcccatgagcacagcgcccacgatcaccggaatgtgcatcagcgtgatggagatgggcggcaccatgatgaagcccagaggggtgaaggtgagcaccgcctccagggcgatcaggatggccagctgggccagccgcagggtctgtttgcttgtgtttctcataaaatttttcctccttgctgccgctccgtccttttgccggatgcggcgcagtcatgtattcgcaacgcctcacaaggcgtggcgttctgtaaaaaagccctcatatcaacgggtgaaaaggtggatagcttgccagttattttacgcctctttcccctcgtttttcccgatggcgctcatagatcaggcgcaggcccctgaggatcaggtcgggttcggtgcggcactcccggcggcacagcgggacgatcaggggcgcaaaagtgccggtgaggatcagggacactttttcccctaattcctcttccatgcgctttgtcatgccctccaccaggcaggccgtgcccagaagcaggccgcttttcatgctgtccaccgtggttttccccacggcgccagggggcggcgtttccagatcgatccagggcagctgggcggtgtgcctggccagagactccagggagatcttcatccccggggcgatggatgccccccgcacggccccttgcccgtccatgagcacgaaagtggtggcggtgcccaggctgcacaccacagtgggacccagtttcatttcccgggcggccacggcctgggtgaccaggtcactgcccagctgggcggggtcgttgatgcggatgggaaggccggttttcagccccggccccaccaccagcgggcgcacatggcaaagccgctccacggcctggtggatgccgaaggtgagaggcggcatcaccgaagagaggatggcgccttccacttcatccgcccggcagccgaaaagccccagggccgactggatcttgacggcgtattcgtcggggaggatctgggtatccacccgcatgctggtctgcatccggagtttatttccctcgtaaaggccgatgcggatgttgctgctgccgatggcgatgactaacagcattttgctcccctcccctgtttttttccgtgggttattataatatccccactccccaaaagtcaaggtccggtgtccggacggccaaaactcgctgaaggctttatgcgctgccaagctcggtgctccgggtgtgataaaccatcacccggcaggggccagagtgcaatcctggcagagtgcatcagaaaagcccggttatatgcacccaggcaaagagaggaacgggagcggcggctcgccgcagccccccttgtgcaaaggggggacagcatggcaaagcc

SEQ ID NO: 4518 - DNA, 16755 bp, Unknown
  16S sequences of unknown bacteria
ttgacggtgagtcgagcgttgatccactgcttcgcgccctttgcgaggggatattcaaggacgacgaaggcacgatctcgacgtacatcggcaggcacccgaccgaccgcgtgaaaatggcggtcgtgagcgaagacaaggggcggcgcgccgtgacgcattacgaggtgctcgcgcggtttgacagaggctttacgctcgtactgttcaaattggaaacagggcggacgcaccagatacgcgtgcatgcgcagtatatcgggcatcccgtcgcgggcgatcccgtgtacggcgtcaaaaaacagaaattcaatcttgcggggcagttgctgcacgcggcgcggctctcgctcgatcatcccgccacgggcgagcgcatgactttcgaagcgccccttcccgaagcgttcgaaaaagtattggaaacgctgaaaaagggcggatatacggagagaaaaccatggtgatcaagggaaaactgatggacggcgcggacatggagaataccttccgccgtctcgcgttcgaagttctggaatcggagggcggcgcggaaaatctcgcgctcgtcggtatccgcactcgcggcgtccccacggcgcgacgcgtcgcggaagaaatatttaagatagagggcaaaaaagttcctttgggcgagttcgacattacgctgtatcgcgacgatctggaaacgctgcccgacgaagcgcgcgttctggacagcgtcatcgatttcgacgtgaccgacaaaaacgtgctgctgtgcgacgacgtgatctacacgggacgcacggtgcgcgccgctatttccgcgctgttggaattggggcggccgcgcagcatcaaatttctggcgctcatcgaccgcgggcaccgcgaacttcccttcaaggcggattttacgggcaaaagcgtcccttcctcccgccgcgagggcatcctcgtgcggtatcgggaaaccgacggcgaaaacgccgtgtatatctgcgacaaataaaaattatttccgtcgatttgcttgcgcggctgtataaatcgtggtaaaataatacagaattaaaactaaaaaggagtttgttatgtctagaaaacaaagaacggaaggacaggcgaagagggacttggtgaaactttgcgcgtttgtcgcgctgatcatcgcggcgttcacatttacgttcggcggattgtttaacggttccatcgtgggagatatcctcaacctggtggcgaagatcgccttgctcatcgcgatcgcgttccccgcgtatcagttcagcagaggattgaataaaggttggaaaatcgtattctggattgcactggtgatttatgtgctcggctgcgtattcggtatgctgaacatcaatatcggaaaataaccttataaaacggaaaaggcggctgcattgccgccttttttctttacaaaccgccgcaaaattggtacaatgaataggaattcaaacagtacggagagaacatggcaaatcctttgatcgcgatcgtcggacgtccgaacgtcggcaagagcacgcttttcaataaaatcgcgggacggaaaatttccattaccgaaaaccgtcccggcgttacgcgcgacaggctgtacgccgacgcgagttggcgcggcagaaacttcaccgtggtggacacgggcggcatcgaactgaaaagcgaggacgtcatgtggaaagagatcctgcggcaggcggataccgccatcgaaaccgcagaggtcattttgctgatgctcgacgggcgggaagaattgaccgcgtccgattacgacgtggcggaaaaactgcgccgcagcaaaaaacccgtcattctcgtcatcaacaaggtggataactattcgcccgataaactttccgaatattacgcgttgggtctcggggagccgttcgcggtttccgccgaacattcgcaggggatcggcgacgttttagacgaggcgctcacctatttcggggatggggaagaagaggataccgaaagtttaaagatcgccgtggtgggcaagcccaacgcgggcaagagcagcctcgtcaaccgccttttggggttcgagcgttccatcgtcaccgatatcgcgggcacgacgcgcgacgcgatcgataccagattcacgctcgacgggcagaaatatacgctcatcgacacggcggggatccgccgcaagaagaacgtgagcgacgacgtggaatattacagcgtcatgcgcgctttcgacgcggtgcgccgcgccgacgtctgccttctggtggtggacagcgccgaagggcttaccgagcaggacgtgaagatcatcggctacgtgcacgaacagggcaaaccctccgtcatcgtcatgaataagtgggacgtcatcgaaaaggattccaagaccatcaataagttcgaagagaaactgcatttcgacctcaaattcatggattattttaagtccgtctacatttccgcgaagacggggcaacgcgccgacaaagttttgaagatcgcgcgcgaggcgttcgaaaacaccaaccgccgcatcacgacgggcacgctcaacgatctgatgctcgacgcggtgcgcaccaacgaaccgcccgccacgggcggcagacggctgaaaatctattactgttcgcagccttccgtgtgcccgcccactttcgtgctcttcgtcaacgacgaggaactgatgcatttttcttataaaagatatctggaaaacgttctccgccgctcttttgacttttcgggcactcctatccgcatcgtctgccgcaagcgcagcgaaacggaaggcggatattgaggaatcagttatgaatgaaattttgtttcgggacgtatggtggatctttgcggtgctggcggttgcgtcctacttcgtggggtgtttcaatttcgcgctgctgatctccaagatcaagcataaggacgtgcgcaagatgggcagcggcaacccgggcacgatgaatatgagccgtcagttcggattgaagatcggcgcggcgactctctttctcgatatgttcaagggcggcgcgatggtgctcgtcgggtatttcgtttttcgtggaaaggtattcgcgggcacggattttctcgtttccgatcttgcccgctacgtctgcggcgtgtgcgtgatcgtcgggcatatctaccccgtcaccatgaaattcaagggcgggaagggcatcgcttccacgctcggaatgttctggtttgcgcttacctgcgattattggtggatgtttttcgcggcgctcggtatactcgtactcacgctattatacatattcaaaagcgaatggggctcgatgggctcgctgttcggcgtcagccttttgaccgtggcgcagggactcatcttctatttccgctacgcgggggaactgaacaatccctatgtgatcgcggtattcatgcttcttgcgttcaactgttttctcacctggtttgcgcaccgcaaaaatatcgtggcgcttttggcgggcgaagaacaccgcacttccgtcagaaaactttcgcacgggaagaaggaaagttgaaaaaatttcgtactaaataaaaaaatgccttcatatactaaactgtatcgaaagagtgtatggaggcttttttctatgttcaataatcagatttacgaggatatagcgcggcgcacgggtggcgatatctatgtgggggtggttggtcccgtgcgtacgggtaaatccacgtttatccgaaaattcgccgaacagctcatcgttccgaacgtgaaggacgcgaataagcgcgccgtgctgacggacgaacttccgcaggccgcggagggcaagacggtgatgaccacagagccgaaattcgttcccggcgaggcggtcggcatcgacgtgaaggacaatgcgcacgtgcgcgtccgtctgatcgattgcgtcggctttatggtcgaaggggcgcagggcgccaccgaagacggaaagcccagacttgtttccaccccgtggagcgacactcccgtaccctttgacaaggcggcggaaacgggcacgcagaaggtcatacgcgaacattccaccatcgggatcatggtcacgtgcgacggctccgtggcgggcatcgagcgcagcggctacatcgctgcggaagagcgcaccgtcaacgaactgaaagccatcggcaagcccttcgtcatcgtcctcaactgccgcgaaccgcagagcgagcagagcacgatcttgcgcgccgcgctcgaagaaaagtacgcggtgcccgttctcgccctcaactgcgagcgcgcggacggcgaagaactgatgggcgttctggaaaaagtgctgttcgaattccccgtcgtcaccgtcgatttcaaaattcctctgtggatgcaggcgctgcccgcggagagccgcattatttcggagattcttgccaaagtcaaggaaacgtgctgtaaagtgcgcaaaatgcgcgattgttcgctgttcgattctatgttcgaggcggaggctccgctcaacaatccgctttccgtttccttaaaattgggcgaaggccgcgcggaagtggaattgagtgcgaaagaggggttattctattcgacgctcagcgaagagtgcggcgaagagatctccgatgacttcacgctcatgcggtacgtgaaatcgctcaaagaggcgaaaagttgttacgagaaattcaagaacgcgcttgccgctgccgaagagacgggctacggcgtggtgaatcccgccgagggcgatctcgttctggacgcgcccgacatggtgcgccagggcaggggctgcggcatccgtttaaaaggcaacgccgcgagttatcatatcatgaagatcgaagtgaagagcgaagtcaatcccgttctgggaacggcgatgggcagcgaggaactcgtcaagggcatgctggataaatatgacaacgaccccgaatcgctgtggtcgaccgaccttttcggcaagaccttccgcgacatggtgcgcgaaggcttaaacgccaaagtcgtcgccatgcccgaggacgcgaagcgcaaaatgcgccgcacggtgacgcgcatcgtcaacgagggccgcggcggagtcatctgcatcctgttataataaaaacgaatagaggacgcccgaaagggcgtcctttttcgcttgctaaacgcgcgaaaattctttataataagagagaataatcaaaggaatgacgacaggtgagacggtatttcaaatatctcaaagaatataaatggcactgcattttcgggccgctcctgaaatggatcgaggcggcgctcgaactgatggtgccgctcgtaatgaaacaaattatcgacgtgggcgtcgccaacggcgacattccttacgtgctcaaatacggcggcgtcatgctggcgatgggcgcgttggggctggggtgcgccgtgttctgccaacgcgtcgcgtccattgcgtcgcaggggttcgggaccaacgtgcgcaacgccctgttttcgcatatcaatacgctgtcttatcgcgagatcgacaaagtcggctccgcctcgctcgtcacgcgcgtggtcaacgacgtcaaccagatgcagagcgcggtcgccattatcctgcggctcgtcgtacgcgctccctttatcgcggcgggcgccatcgtgctgtgcatgatcacggactggcagatcgggcttctggtcaccctcgtttccgttctcgtggggctggtcctctttatcatcatgaaaaagagcgtgccgttttacgcgaccaatcaaagaaaactcgacagaatgtcgcagatcaccaacgaaaatttagagggcgcccgcgtggtgcgcgccttttccaagcgcgacaaagagcgcgcgcggttcgacggtgcggctgaggcgatgctgcaaaattccatgcgcatcggccgtatttccgcctatctcaatccgctcacgtttgcgctcgtaaacttaggcatcgccgccattctcttcgtcagcggcgtaaaagtcaatatcggcaggctcaccagcggcgagatcatcgccgtcatcagttacatggcgcagatcctcaacgcgatgatcgtcatttccaatatggtttcgctgttcaccaaggcgcacgcttccatgaaccgcgtcagcgaggtattcgatctgcagtcatgtatccgcgacggggggaacgcgcagcccgacttcaccgcgcccgcgatccaattcgaaaacgtcagtttttcctatgcgggcacggataaatacgcgctcaccgatgtttctttttctctggaaaagggaaagactttggggatcatcggcggcacgggcagcggcaagaccacgctcgtgaacctctttccgcgcctgtacgactgctcgttgggcagcgtgaaagtgttcgggcacgacgtgaaggactattcgcaggaaagcctgcgttttatcttcggcgtggtgccgcaaaacggcaatctgttttcgggcaccgtgcgctccaacctgttctggggcaacgacaaggcgagcgacgaggattttgcggaagccttgaagatcgcctgcgcctatgatttcgtcatggaaaagggcgggctggatcagcccgtggcggaatcgggacgcaatttttcaggcggacagaaacagcgattgaccatcgcgcgcgcggtcgcgggcaaaccgcccgtgctggttttggacgattcgtgttcggcattggattttgccaccgacgccaaagtgcgcgccaatctcgccgcgctggaaggcacgacgacggtcatcatttcccagcgcgcctcgtccatacgcggcgcggacgaaattctcgttttggaggacggccgcattgcgggcaggggaaagcacgaagaattatacgaaaattgcggcgtgtaccgcgagatctgcgattcgcaggcgagggcggaagcatgaaaaataaacgtttgaaaggcgtcaagagcgggatcacccgcaggcttctgacctacgtcaagccgtatcgcggttatgtggcgggcgcgttcgtattcagtattttatacgtcgcctgcgtgctcatcggtcccgtgctctacggctgggcgatcgacgcgatgatcggcaagggcgcggtggatttcgcggaagtcgcgaaaatgacgacgggatttatcgtcagcgtcgtcttttcctcgctctcgcaaaaatttctgaataactgcgtcaattcgctgtgttataaacttgtgcgcgatctcaggcgcgaggctttttacagcatcacttccgcgcgcgtcaaatacgtggatacgcacgcccagggcgacgtgatgagccgcgtcgtcaacgacgtggacgtcatttccgacggcctgttgcagggcgtggcgcaactctttacgggcgtaatgaccattctggcgacgctcgccgtcatgttcgtcatcaattatatcatcgcgatcgtagtggtcgtgttaacgcccgtttccatgttcgtggcggcgttcatcgctaaaaatacctttaagagttacaaacggcaggtggcggtgcagggcgaactgaccgcgcacaccaaggaactcttgggcggacagaagacggtcatcctcttcaacgaagaaaaatactccgtgcaaaaattcgaagagatcgaccagcggctgtacgacgtgggctggaaagcgcagtccttttccgcgctcgtcaaccccagcacccgttttgtcaatgccgtcatcagcgcggtggtgggcgttctgggtgcgatcttctgcattctcaccgtcggcgattcgctcgttttaggcgcgttcacccttcccgcgttttccgtgggcatgctctcggcgttcattagttacgccaaccaatatacgaaaccgttcaatgaaatttccaacgtcgtcacgcagttgcaaaacgcgttcgcgtccgcggggcgcgtgttcgaagtcatcgacgaacccggcgaagatctggcgggcgaagccgcgcttcccgtctgccgcggcgatatccggctcgaaaacgtcggtttttcctattcgcccgaacaaaaactgatcgaaaacctcaatctcgacgtgaaggcgggcagcaagatcgccgtcgtcggacccacggggtgcggcaagacgacgctcatcaatcttttgatgcgcttttacgatctgaacgcgggcaatatctacgtggacggcgtcaacgcgaaggacattccgctggacgaataccgcaaactgttcggcatggtgctgcaggagagttttttgagcggcgaaacggtggcttacaatatttcctacggcgcggaaaacgcgacgcgcgaacagatcgaacaagcggcgaaagcggcgtactgcgacttttttatacgcaatctggaagaggggtacgatacgcggctgagcgacaacgtgaacgtatcgcagggcgaaaagcagttgttgtgcattgcgcgcatcatgctcgtcaatccgcccatgctcatattggacgaagcgacgagcaatatcgacaccatgacggaaatgcgtatccagaaagcgtttcagaagatcatgaagggcaaaaccagttttatcgtggcgcaccgcctatcgaccatactggatgcagataccattctggtgatggaccacggctccgtcatcgagcaggggacgcacgcggaactgctcgcgaaaaaaggattttactatcatttgtataattcgcagtttgcgagaggcgaataaaaaagagcggaacgcttttgcgttccgctctttttaatgctgcgggtgcagatttccgtctttatcggccaccattacggggcgttcgtccttcaatgccatcaagtaatcgttgtactgttgatccgtcagagtttttattttgttttttttcttttttgacatactaaaacactccctttgggtttttcaacagtatggacaaaacgttttgaaattatgcgtaaaaaacagccccgcgtctgtcggcgcggggcgttcgtttttcttttataaaactctcaatcttgtcacgaattcgagcgcgccgatgtcggcgatcactttatcggaaggcttttcgtcgaggtcgacgatgagatacgccttgtcgcctttggatttatccagaaggttggcgatattgatgcccgcagcagaaatgatggaagtgatcttggaaataacttcctttacgttgtcgtgcatgacggtcatacggctcaccgaagaacggggcgagaaaacgtcgggatagttgacgctgtggacgatatttccgttttcgatgtattccgcgagttctttcgccgccatcatcgcgcagttgtcctccgcttcgggcgtggacgcgccgagatggggtacgcatataatatttttgacgccgatcagttggtcggcgggaaagtccgtgatatagcgttcgagttttccgctctcgactgccgcgacgactgccgcgttgtctacgagttcgccgcgcgaattgttgatgagcaccgcgccgtccttcattttcgcaaaggtatcggcgttgaacatattggcggtcgagggggtgaaggggacgtgcacggtgataaagtccgccgttttcaaaagcgtatcgaggtcggaagtcttgacctgcgtgtcgaggtgcaaagccccgtcgatggagagataggggtcgtagccgagcacgttcatgccgagtccgacagccgcgttcgccacgttcacgccgatggcgccgagtccgatcacgcccagagtcttgccggagatctcatgtcccacaaaactcgatttgcccttttcgacaattttggaaaggccttccgcgccctttaacgttttcacccagtcgatggcgtccgtgatcttgcgcccgccgaggaaaagttcgcataacaccagttctttcaccgcgttcgcgttcgcgccgggggtattgaaaacgacgattcccttttccgtgcacttgtcgatgggaatattgttggtgcccgcgcccgcgcgtgccaccgccagaagttcgtcgtttaaagggtattcgtgcatattgaaactgcgcagcatgatgccgtcgggattttttacgtcctttccgaatacgtagcctgcgggcagaaatttgtccgcgacttcgctgatctcgttgagttttaaaatatttgccatgatctttctccctatttgttctcgttttcgaactttttcatgaactcgataagcgctttcacgccctcgacgggcatggcgttatagatggaggcgcgcatgccgcccaccagcctgtggcctttcagggaaacgagccccgcggctttcgcctctttgacgaacttttcgtccgtgtctttggagggagtgacgaagggaacgttcatgatggagcggtcttttttcacgacgccgttggagtagaaagaggagttgtcgataaagtcgtacaggagtcccgctttatactcgttgatcttgttgatctctttcacgccgcccagttttttgagatggcgcagaacgaggttcgccatgtagatggagaagcagggaggggtgttgtacagactgccgttttccgcctgcgtcttccacttgagcatggtggggcattcgggacggggattttcgatgaggtccttgcgcgcgatgacgatggtcacgcctgcgggggcgaggtttttctgcgcgcccgcatagataacgccgaatttggaaacgtcgatctcgcgggaaaggatgtcggaactcatatcgcaggcgaggggcgccttggtttcgggaaatttcgtaaagcgcgtgccgaaaatggtgttgttggaggtaaagtgcacgtagtccgcgtcgtcgtcgaattccactttgtcgagatcggggatatatgtgtaaactttatcttcggaagaggccgcgacgcgcgccgcgccgtagatcttgccttcctgccacgcctttttcgcgaagttgcccgtcacgaggtagtcggctttgcctttgtgcatcagattaaggggcaccgccgcgaactgctggctcgcgccgccctgtacgaagatgacgcaataatcttcgggaatattcaaaagatctcttaaattgcgttccgcctcttccacgacggcggagtacgccttatccctgtggctgatctcggtcacgctcatgcctgtgcccgcaaaatccagaagctctctttgcgcctcttccagaacctccgcgggaagcatggaagggcctgccgaaaaattgtaaactctcatatcttaaaatctccttcaagatttgtttaacagggtatatcgtgaattattatacaataaactgtattttttgacaagtaaatcggccgacaatcggcgctttgcgggtaaaaaaattctgcttgcgcggaaagggtataaaaattcgggtaagttgtcaaaaataaatcggcaaagtatttactttttttgaaaaatagtgtaaaatagatatcggaatagtttatattctttctctcggagaaaaaataatcgatcgcggggtttaaaatggcgttttctgacaacaatccgaatagcgggaataccttgacttcttatgagaaattgaaagccacggaaaaatatttagcgaaaatgaaagacgttctgtccacaatggatgagatctcgcgcatcaagcgcgcgaacggcgacaaggacgccgattccgacgagatcggggggtataagcgttcgtcggtcgtaaaactcgtttccgaactggaaaaacagcgggaaatgctgctttccgccatcgaacgggaaaagaacgaagcggtcgccgccaaagagaaggaactttccgtcaaagaaaaggagatcgaagaattgaaagcgcgcgaggccgcgcgcaccgaaaaggataaatccgaacttctgtcgaaaaaggaagcggaacttgccgaaaaggaaagggaactcatgcgccttcgcgcagagcgcgccgcgcacgaagaaaaactttcccgcgaacagaaagaaaaacaggaagccatccgcgcccgcgacgaggcgctcaaagccaaggaagaggcactcaaaatgcaggcggctctcgcgctgcgcgaacaggaacttgccacgctcgcgcccaccaaaaacgacaacgcggtcacgagtttcagaaaaggcgacaacgcccttgccatcgaagggctctacacgggactttccatggacatcgaaaagatgcgcgacgatattttgcaggaaatgaaatattcctacaagcaggatatctccatctacgacgatctggcggaaaagatagaatccatcaaaaccatcgatgcgaacacgctcgaagagggactcaaacccttgcaggttctcaatacgctcgatgaaaaactcaacgcgctgcaaacggtcgattacgattgcatcgtggaaaaggtgagcgaaaaactcaccgaaacaaagatcgattacgacgttctggcggaacgcgtggcggctttgatgacgtcctacgccgaaaacgcgatctcgcccaaaatgcaactgagcgccatcgagcagcgcctcgaagagatgcagtatgctttgagcggtatcatgagcgtcaagcagatgcccgagttccgcaaactggatacgatggtggaggagtatctccgcacgctctcttacgacacgattcccgatattctgatcttatccgacgagatacgcaaaaaggcgaaccgccacatcgcgggcggcaacacgctgcgcggcgagggaatgctcgcggatctgggcgcgcgccttcgcaacgtggcgctcggcggatacggcgcgctcgtcgtcatcgaagacacgatcaagacgcattctttgcctaaaaccctcagcgacgaggcgttcgccgagttcaaagaggcgtgcgcggagttggaaagaagccccgccgtctgcggcgacgagttggtcggaaaagtggttcgtaccaaaaaagcgctcctcaacgacgtagatctggcgcagttcgacaacgacaccatgggcgaacttctggaaatattcgcggagatccccgcgggcgaactgccttcggaaactacgatcgtcaatatcggcgcattgaaaaaggaactgatgagtttcaacctttcctatttcgttgaactcgaacccgtcgcggcgcagcccgaaaagacggacaacgtggatacgcaggccattttggaggccatttctaatatcaagatccccgaggcggtcgcaatcgtttcgcagcccgttgcggcggcgaaagaaccgacggaaagcaaactcgaagaagtcaaaaaggacagcccgaacgtccgcgtgaagaaagcgcgcgttctgcgccccgccgtttcttccaaagacaacaagacggaaaaagtcgtgcagcctctgcgcgtggtgcgccgcagtatcaaggcgagcgaagaaaatcccgacgcgctttccaaagcgcttgtggggcaggtcgcgcagaagatcgcaaacagcatgatcaaataattacgcccgccgcgcgttttttgcgcggcggactttgagtattcaataagatttttacccgctttacgcgggtttggaaataataatttaggggtacagggtacccgcaaaagccgtgccgccgcttatgctgcgcgccgcgttttcagacagaagaagatttcgtgtatacgaggctgattttttcgttcagccttttgttttgttgcgttttaaaaaacggcttttgctaaggagtttcatgaaagaacaagatcaaacgaaccaaccgcaggaaaaaaagaagcgcgccgccaagccgaatttcggcttgtttttaggcaataacggcgccgcggcgggaaaaccgcagggcggcgccgcgccgaatccgaacagacagccgcaggagcgtcttgcggaaacgggggacaagcgtcccgttcatccgcgcgccgcgcgccccaaagacaatgacgcgcgcagggaaaatacgggaggcaacggcggaaacaggaacaacggcggcaatgcgaacgcccctgtacagcaccgccgcagaaacgaacccgcgtcgggaaaaccgcagaacgcgcccgcggcggaaccgcaaaacgtgcagggcgagaaaaagggcgcaaggaagggcggcggcaagtcgaaacgcttcggcaatcccgtcaagatcatgtttttaggcggcgtcggcgagatcggcaaaaacatgaccgccatcgaatacggcaacgacatcatcgtcatcgacgcggggcttacctttcccgacgaggaacttcccggcatcgatctggtcattcccgacatcagttatcttgtcgccaaccgcaaaaaggtgcgcggcattctcatcacgcacgggcacgaggaccacgtgggcgggcttccctacctcttaaaagaggtcagcgcgcccgtgttcggaaccaaactgacgctcgcgctcgcggacaacaaactgcgcgaacaccgcctcaacaaggtggatatgcgctgcgtcaagcccaaggataagatcaaactcggctgtttcggcgtggaattcatcaatgtgaaccattcgatcgcgggcgcggtggcgctgtgcatcgacacgccgcagggacgcatcttccacagcggcgacttcaagatagacctgacgcccgtcgcgggcgaccagatagaccttccccgcatttccgagatcggaagggaaggcgtcaaccttttgctgtgcgaatccacgaacgtggagcggcagggatacacgatgagcgaaacggtggtaggcaccacgctcgaccatctgttcgcggaacacgtcaaccgccgcatcatcgtggcgaccttcgcctccaacgtgcaccgtttgcagcagatcatcgaccttgcggcaaagtaccgcagaaaagtcgcgctgtcgggccgcagcatgctcaacgtggtggacgccgcgggcaagatcggagaactgaacattcccgagggcgtgctcatcgacgtggaaaagatcaaaaactatttcgacagggagatcgtcatcgtttccacgggcagccagggcgaaccgatgagcgcgctcacgcgcatggcgtcgggcgatttcaataaagtgaccatcggctccaacgacaccatcattatctccgcctcgcccattccgggcaacgaaaagatggtgtataaagtcatcaacaatctttatcgcaagggcgcgaacgtcgtctacgaatcgctggaaaagatccacgtttcgggacatgcctgccaggaagaactgaagatcatgcactctctgttaaagcccaaattctttattcccgtgcacggggaataccgccatctcaaacgccacgtgcaactggcggcggatctgggcatgggcgaaaacaatatgctcatctgcgggatcggcaactgcgtcgaactgacgcgggaaaccatgcagttcggcgaaagcgtttcttccggctcgcgtctcgtggacggcggaagcctggaagacagggaaaacagcgaagtgatgaaggacagaaagagcctgtccgaagacggcatcttcgtcatcaccgcctgcgtttccgagcgcagcggcgaacttctgagcgaacccgaagtcatcaaccgcggtttcgtcatgcccgaaaatgccgattatgcgtcggatatccgtcagatcgtcgtcggctgcgcctcgcaggttaacgtcaggggcgaccgcgacaataccgaatacaaggcggcggtacagaaatccgtcaaaaatttcatttacaaaaagacaaaacaaaatcccgtcgtcatggtaaatatcatccgtatctgacggaaaaaatcgcggcgcagccgcgattttaaacatttcaggaagttatgcaaaatcttttatcgttcggtcaacttcggatagacgcacgccttgcctgccttcgggaaaaagcaaagagcgggcgcgatccttccacccccgacgaaacgctcaactatcttctctatacgatccaaacgctccgtccctcccgcattttggagatcggcacgggtgaggggctgtcgggcgcggcgatgctttttgcggcaaaagacgcgcggcttacgagcatcgagtgcgtagaggagcggtttttcactgcgaaaaaaaatttcgccgatctggggctttcgatccgcgcagatctgatcttcggggacgcgggcgaagtgctcccgcatctgaacggcgcgtacgatctgatttttttggacggtcccaaggcgcagtatctgaactattttccttgtcttaaagcattgctgcggtcgggcggagtgctgttcgcggacgacgtgctgctgtacggctgggtggacgggcgcgagccgatgcccgcaaagcgccgcccgctcgtggaaaagatccgcgcgtatcttcgcgccgtgctggaagatcccgattttatcaccagcgttcttcccctcggcgagggcgtggcggtttcggtcaggttataataggatgaaagagaaacgttttagcgaactgctcgcgcctgctggcaatttcgaaaaactgaaaacggcgctgtatttcggcgcagacgcggtttacttaggcggaaaggatttttcgctccgctcctttgcggataatttcaccgccgacgaaatgaaacgggcggtggaaactgcgcacgcggcgggcaaaaaagtttacgtgaccgccaatattttcgcgcgcaacgcggacttttcggcgctttccgattattttcgttttttaagcgaaatcggcgcagacgcggcgctcgtgaccgacgcgggcgtgttcgccgccgcaagagccgccgca

SEQ ID NO: 4519 - DNA, 13996 bp, Unknown
  16S sequences of unknown bacteria
gaaacagctgcacgatctgtggtgcataatgaagtcctgccagaatagcaacgactaaaaccacgatacataccaggatccggtttctcagctcccgcagatgtccggacaggctcatctcgccctcctgctccgtggtctctgagtgcttagtcttcctctctgtcggcactctctttctcctttgcttccgcatcttccattccgttgcggaattcttttacgcttttcccaaacatgcgggtcagtttcgggatctgtgtaggtccgaatacgatcactacaacagctaaaatgatcaaaagttctgttgttccgattttcataattaattctcctctttctcctgctcttgtggctcttccatagcgccatctgtctcctcaggaaccttcggttcctcaactggtgccttcttcggttcttcttttccgatattggcaaaggatttctgtacgtcctttacattcgaacgtaccgctttatccagttcattcaatggttccactgcttcccgaagcggtctctgtgcttcctgcagcggctctaccacactttctctgatgtctttggtagcttcatctgaatatttccggaactgagccaatgcctctcccatcttctttgcatataccggcagtttatccggtcccaatacaaacagggcaacaattaggatcacgatcagctcagacattccgattctcataatctttcacctcccagcagaatcttatgccgctttttatttgtcaaaagtaccatgtatgctgttttactgtcaatggatgttattcccatctggcataaccatccggaataccattgccatttttttaacataaagaattgcataaaaatatccccgcatttgcggagatacatcattgtcatcctttaagtttttagcaactttttaactttacttttataatcttactatattttttagtatttttcaacaggaaacatataattaaaccatatttcataaaaaaccaaataaaataaccagcagcaaagaataacactgctggctacttctggcagcggagacggtgggattcgaacccacgtgccggttgcccgacaacttgatttcgagtcaagctcgttatggccacttcgatacgtctccaaaaaggtgagtgcatcagcactcacctttattattctatcataggtaaaactattgtgcaagtttttctattatttgaaatatttcacaccggactcgaagatcttcagatcctgctcaccgtagatgttcatggcaaccgcagtgtcacgacgctcggagtgtgccatcttaccaagcacacgaccatccggacttgtgataccttcaatggctgcataagaaccattgacgttccactcttcatccatgcttgcatttccttccggatccacatactgggttgctacctgtccattggcaaagagacggtcgatccactccttcggagctacgaaacgtccttctccgtgggaagccggattcacatatacgccgccaagctcagctcctgcaagccacggggacttgttgctgaccaccttagtgtataccatcttggagatgtggcggttaatagtgttgaaggtcagagtcggtgcatccggattctgtccaacgatctcgccacccggtaccagtccaagcttgatcagtgcctggaaaccattacagatgccaagagccagtccatcacgctcgttcagaagcttcattactgcttccttgatcttctcattctggaaagcagttgcgaagaattttgcagatccgtccggctcatctcctgcggagaatccacccgggaacatgatgatctgtgcatcactgatagctttttcaaatgcatccacggattcacggatatcatttccgcttaagttcttgaataccttcgtcacaacatctgcaccggcacgctcaaatgcctttgtgctgtcgtactcgcagttggtacctgggaataccggaataaataccttcggtcttgccactttatgacggcatacatagatgctgtctgctttgtagatcggagtctcgaccttggttgtatctttaactgccacggtcgggaatactttctcaagagtgcccttccatgcagccagcgcctcatcggagctgatggatacatttccataggagaaatccttctcggtcacttcaccgatcacagtgtaagtgatggacagctcgcccactttgccagccggaacttctgcaacgatagaaccaaatcccggtgcaaatgcatctctcggatccaggttgtgctccagcttcactccaagcttattaccaaatgccatcttgctcactgccggaacgattccatttccatccagtgcataagcggacacaatcttgcctgcttttacatcttcgaagaattttccatactgatcacttgcttccttgtaatccggcagatcatactcgtcacggccaagcttcatcagaacgatcttattgcctgctttcttgaactcaggtgtaatgatatgtttatagcttgcaatatctactgcaaaggataccagagtcggcggtacgtcaatatcattgaatgtaccggacatactgtcctttcctccgatggacggcagtccgaatccaagctgtgcactgtatgcaccaagaagtgctgcaaacggctgactccaacgatgaggatcttctgtcattctgcggaagtattcctggaaggtaaaacggatcttgctgtaatctccaccggtcgccacgattcttgccacagactccaatacagcataaactgcgccgtgatacggtgaccagctggacagatatggatcaaatccataactcatcatggttacggtatccgtctttcctttgagtaccggcagttttgcaaccattgcctgggtctcagtcagctgatattttccaccgtaaggcatcagtacacttcctgctccaatggatccgtcgaacatctcaaccagacctttctgggagcatacgttcagatctttcagtacagccagccatttctcacggatatcaccgacttcttttctttcaaaataacgctcgtcctcagacggcatatcaactgccacgcttgtttcctgatgagcaccgttggtatccaggaatgcgcgggaaatatttacgatctctttgcctctccacttgagaaccagtctcggatcttcggtcacttctgccacgcagacagcctccaggttctcttcagaagcatatttcataaattcatcaacgtctttcgggtctacaaccactgccatacgctcctgagattcggagatggcaagctcggttccgtcaagaccttcgtatttcttcggtactttatcaagatctactaccagtccgtctgccagctcaccgatggcaacagacacaccgcctgcaccaaagtcgttacatttacggatcagtctggtcacttccggacgacggaacagtctctggatcttgcgctcagttggtgcatttcctttctgaacctcagctccacaggtctcgatggaagcctccgtatgaaccttggaagagccggttgcaccgccacagccgtcacgtccggttctgcctcccagcagaatgataatatcacccggatcagaagtctcgcggatcacgtcttttctcggagctgcacccatgacagcaccgatctccatacgttttgccacgtagttcggatgatagatctcttttacatagccggttgcaagtccgatctgattaccataagaactataaccgctggcagcaccacgcaccagttttttctgcggaagctttcctttcagtgtctcagataccggaaccgttggatcagcagcgccagtcacacgcattgcctgatatacataagtacgtcctgacaacggatctctgatggctcctccaagacaggtagcagcaccaccgaacggctcgatctcggtcgggtggttgtgagtctcatttttaaagttgaccagccactcttctacttctccatcaatctctaccggaaccacaatagagcatgcattgatttcatcagattcctcctgatcctgaagtttaccttcttttttcagctttctcatagccatcagcgccagatccatcagacagatgaacttgtcatcacggcccttaaaaatctccttatgatcagccacatactgctcataagttttctcgatcggtgtacgatagtagccatcctcaaaggttacatccttaagttcggtagagaaggtggtatgacggcagtggtcagaccagtaggtatccagcacacggatttctgtcatagacggatctctgtgttcttccttcttaaaatagttctgaatatgtaagaaatccttgaatgtcatcgcaagattcagggatttgtaaagtgcctccagatcagcttctgtcatgtctttgaagccatcaaagatcttaacatctgccggttcttcaaatacagtcaccaatgtctctggtttcaccatgccggtctctctggaatccaccgggttgatgcagaaggatttgatagcagacaactcttctgccgtcacatttccttcgattacatataccgttgcagtacggatcaccggtttttctgcagcattcaggaactgtacacactgtacagcagaatctgctctctgatcgaactgtcctggaaggaactccacaccaaagacgcttgcatccggtgcagtctcaaactcttcccgatacagcacatctaccggcggctctgaaaataccgtctggcatgctctctcgaaggtctcatcaccaatattttccacatcgtagcgaatcagcacgcggactcctgtcacggtctgaatgcccagatagcttctgatctcttcttccagttcctttgcttttactgcaaatgcctgtttcttctcaacaaagacgcgtcttaccatgctatttccctccattgtatgtatgcgtacctttttgtgtctatcataccacaacttttctgataagtaaatttaatatatataatttattttattattattacttatatatttataatggaggaatgagaatacattcagttccctcatttcttgtccttatggaatatatctatgaccaaatgcaaaaaagtgtgcaaccttggcatactgccgcagaattgcacacttctatttatattgttttatttatttcggttcgcaagtcagcataacacccagcttctggaaggtcttctcatcagctgcactgagcatacgggaactgtgtacctgactgccccgcagacgcggaagctgcttcagagccagatctgccagtggattagtttccgtacttgcagatagagcgatcaacacttcctccatgtgaagacgcggattcttgctaccaaggtagtctaccttcagtctctggatcggacggatcacgttcggagtgatcaaaagcacgtcttctccgatgcctgccagatgcttcagtgctttgatgagcaaagctgcgcatgctccaagcagctccccggtcttgcctgtaatgatcgttccgtcatccagctccatggcaactgcagtatatccggtctcttctgcacgtttaagagctgccggaactaccttacggtcttttaccgatacgcctgctgtattcatcagaagctcgatcttataagcttcctcttcttttgatttacctctggcaatatttaccagcgtctgatagtaacggcggatgatctcctgaccagatgcctccctgcatgcctcatcatccacaatgcagtttccggccatgttcacacccatatctgtaggggatttgtacggacactcaccgtagatctccataaacattgctttcaataccgggaagatctccacatcacggttgtagttgacagttgtctttccataggcttccagatgatacggatcgatcatgttcacatcgttcaggtctgcggttgccgcctcataagccaggttcaccggatgagacagaggcagattccagattgggaaagtctcgtatttcgcataaccagcacgaactccgcgtttatgttcgtggtagagctgggacagacaggtcgccatctttccgcttcccggtccaggtgctgttacaacaaccaacggcttggttgtctcaatatattcattatggccatatccatcctcgctcacgatcagcggaatattgttcggataccccgggatcagatagtgacgatatactttcacgcccatcttttccagacggttctggaacatctgtgcgctgtactgtcctgcataatgcgtaatgcagacacttcccacgtacagattcttagactcaaagatgcccttcagacgcagcagatccgaatcataagtgatacccagatctccacgaactttatttttctcaatatcttctgcgctgatcacaataacgatctccacctgatctgcaagctgcatcagcatacgaagtttactgtccggctcaaatcccggcagtacgcgggatgcatgataatcatcataaagcttgccgccaaactccagatacagtttattgtcaaactgctgaatccgttcccgaatatgttctgactgcatcgccagatacttgtcattgtcaaagccttttctcatgatcgtcctccttgttgtctgctgttcatttccggataaaactccggattttctttctatttaactcacggatgcaaagcatgacagaatacaaaatgtttgtccgaaacatttttcaggcagtaaaaaacaaaaaagagattccgcaatacacgaaacctctttattttagagcacgagacgggattcgaacccgcgaccctcgccttggcaaggcgatactccaccactgagccactcgtgcaaactgcctgttctgtcactgcatcagcgacaatcagtattctacccgaacatggcagatttgtcaatataaaatccatgattttatgtcagattttttcactgtcattgagaatcagcaaagaacccacataaacatagttctgaaactctttttccagaatgctgtccagcttctgatactccagatcaaaccattgctcctccgccgtcaccagcatatgggacagagccacacctgcatcaaacagattaaaatcctgctgggtctgatatcccagtttccccggttttttaacaaacagatggatccgatcttcagaagacacaaatctccatggctgacggttcatggccgacggtgccagtctggctgcttccagaagctttctctgaacttttccaaaagctccccggatcgttaccagcttcttcagttcaattctccgaaaatcctcataagagcgctccagaggttctgccggatacccaaatgccatgatcatgaccagctccagatttttctcctggtcttttttaagctttgcacctccctgataacagcttccaatgcctttggtaaagagatacaaggacaactgctccataaggcatccggcattcttccggtaatcttcgcagatttccgaataaagcgcaacataataaggagcatccacacggaacagtccttttaactgatgctcttccttacggaaaatcttccatttcacctgaatatccgggcggatgccgattgcatcctcaccgaatttttcaattttctccagcattgccggagaaatctcatcgtttttgtatttccgaatggatcttcttcggaaaattgcttcatatgatgtcatgctttatgccagcctttccatctcatccagatattcagagaacactaaaagcgcatcctccaccggttttttctgttccatatccactcctgccagtctgagaagctccagcggatacatagagcttcctcctttcaggaatttcttatactgctctactgctgcttctccttctctcaggatcttccctgaaagtgcaattgctgcggaaaatccagtcgcatactgatatacataaaatggtgtatagaaatggggtatccttgcccattccatctcaatctgccggtcaatacagatatcttcaccaaaatatgctttgttaagatcataataaatgctgcacagacgttcagccgtcagtgcttcgcccgcctcctgcagtccgtgggtgatcttttcaaattccgcaaacatggtctgtcgatacagcgttgtacggaactgctccagaaaataattgatcagatatgcttttgtcttcggatctttggcctttttcagcaaatgatggatcaacagtgcctcattgcaggtagatgctacttctgcaacaaagatccggtaaccggcataaatatacggctgtgtctcgtcagaataccaggagtggagtgcatgccccatctcatgtgccagggtaaatacatcatttaatgtcccctgataattcagcagcacatatggatgcgtgccatatgctccccaggaataggctccgcttctctttccctgattctcatacacatcgatccagccatgttcaaatccatctttcaaatgggacagatactcttctcccatgggtgccagcccttccagaactgttttctttgcatcttcaaaagaaaaatgttctccgctgttctctgtcatgggtgtatagagatcatacatatgcaattcatcaagacccagcagttttttacgtattttcacataccgatgcatcagcggcagatgctcatgcaccacatggatcagattgtcatagacagacaccggaatatggcttccatccagtgctgcctccaggtctgatccatatcttctcgctctcgcaaagaatacttcctgcttcacgttcgcacgatacgttgctgccagagtattgcggaatttctcataaactccgtacaatgcctcaaatgcatcctttctcaccctctgatccttactctgcaacagagaaataaaacgtccatgggtcacttccacgtccgtgccatcttcccctgtgatcttcggaaaacggatatctgcattgttgaacatggaaaaaatatcttttggactttctgccagttcaccggcagatgccagaagcttttccatctctccgggcagaacatgtgccttttgtctgatcatattttcaaaatactgcccatatacccgaagttcaccgttttcctgtaaatatttctcaatggttccttctggctgctccatgatctccggctcaatataagaagtccgctcgaacatctccaccagaagactctgtgcgcggcttgccagattctgatagacggcattatctgtattttcatgtagtcgctgattggcataaacatacactttttctgcgagcatattcattttgtcacataatctttgcatggaaaggagggtctgcgcactctcgcccagccgaccttcataagcagacaattccggcaggtgctccttcaatcgggtaaaatccgcctcccattcatcgtcatttttatataaatcttcaatcgcccactttgcctctgcgggtatctcctctcttgtacacaatcctctatctgccatcgtattcttcctttcaccgtttcttattttaacgcaaagctcctagaagtcaatgcaagatagaaaaaaagacactgtaaaatctgcttttcaaaacaggtttcacaatgtccctccttctttttactcattacggatcgctgcaagcggactcagcttcattgcccgaagtgccgggaaaaatcctgccaccatgcctaccagcaccgcaaatgccagagatattaccaccagccagattggaatgtaagagatcccttcgtagtatcctcctgctgcagatccggcaatcatattgatcacgatcgatatgatgccgctcaggatcaaaccgatcagacctccgaaaaatccaataaatccagcttccagcagaaacatagttctgatatttccaagatcacagcccagcactttgatgataccgatctccttcgtccgttcatagatagacatcatcatggtatttgcaataccgatcgctgcaacaaacaaggataccgcaccgattcctccaagcaccagctggatcatcttcatctgttcctgggtctgctccatccattccgcattgctgttggcaccatagcccatctcctgtatggtcttctgtacttctgttacattttccatcttatcaacccgtacatagacctgttcataatagagttctttataaggtttcccggattttgtcgtaggctgtcccgggatcactttatttttgaagattttcttcagctctgctttcagtgcatcaatatcagcataaacactatagctgttttcactatattcatcagtccctccagccagcattccgcaagtaggaataatatatttcttcggaggagttgtaggcgtactgccgtctccacttccaccattcttcgactgataataggcatccgtatcaaagatcacaaacaccggctgattcatcagatccacatctatggcttcactgttttcccaatagccttcattggtctttgaattataaaaattggtgatcacctgattaccatagaagaacgaaagcggagcacctgcttccggaagtgtaccttcaccaactttcatatccatattctgaagtgcttcctgtgtcattccctgaactgtcaggctgccttcgtaaactccctgcttcagcagcacataggtactcagtatcggagaagcaaattccacatgaggaatcttggagatcgtctccacaacgccatcgtcgattctcagttcttcctgtgatgaatcagaattataatttccccaggtatttacattgatggtcgtcaaacctccatactgctcgatctgctccaaggagcttttctgaagtcccagaccgagggaaatcataaccacgatcgacgcagttcctatgaccactcccagtaccgtcagagctgtacgaagctttcgtctgagcagattggaaccgctcatgcgaagcaaatctgaaaatttcataagctgccccttctattcctgatcatctgtatcttctgtctcatccgatgtgatattatctccatcttcttcatccagatccataatatcgtcttccagattctgctgctcttttttctttttccgtttcatcacgatgactgcacctgccacacctgctgctataagaatcactaccacaacagcaatctttccaccgattcccatgccatttccagtgtcaccatcaggcatcgcggtgtcatcatgcataccatcatcgtaaaccggttctgttacaaaaagcgaaatctctttctcaacggtagttggtgctccggtctcatcctcataagtgatctgcagctttactgttccatcgtcagtagtcgctgcttctccggtcagatacatatccacagaaccggtagctccagaatccaggttaccaacaaagcagtctccaccagagaagaactcactgtcagtcttcacagacacattgtaaagcttggtctttccaagattgtagatactaaacatcacattggcttcactgcccacatcaatgctggacggtgtcacctctggctggctcatgtcgattcttgcttcctgcttcaccggaatggacacactggccttatttgtataagcattcacatgctcatcctcataactcatattcacatcaatagcatacggcttctgtgccagatcagacctggcttccatctcgatctgaatatctctggtcccattttttgccatcttatctacaaaaatagtattggaacctgcagtcggaaggaaggattcataggttgtctccgaatcttttccctctactgccgcatcaaactcaaaaagcatattgttgacactggtagctgtagatgtgtttttcagatgaagtgtcagcataaagctatcacctgcatgtaccacttctggatttgtctcaaaaccagtcacgatcactcgcggggtggatgcttttccatctgcactcacacctgcggtaccgctggtctgaatatacgtatccagggtagtggtctgactgcttccgtcagatgcaaaatatcttacattaaaggaaatcttctgatatccattccccacatcgcttctggtctgaagattccaggtcagttcccggcggcggtccatatcagacatacccgtatcggttcccggaagatcctcaatggtctgagaatatcctgactgggtgatctcaaacggccaggtagcagtgtccgtactgagcaccggagtcaccacagcctttgttacattggtctttcccatattcacgattggaagtacgatgctcaccggttgtcctgcattggccaccggtgtcacccagttgccgccgacggtcagaaaatgatctgcattaaccggaacggtcgtgttatcgtctttgtcatctttgtcatctttgctgtcatccttggggggattaacgatgttgttcatctcgtcttttactactgcgatgtaggctgccagttcctgcttggatttgtatttgtttaccgatatagtatcatcgctagtatatccgatttctttgtatgcttcttgcaataacgcatctattctggctgtctgatttgcatttggcttcaaagaaatcttatatgctcttaattctgctgctttttctttaatatcagcttttagttcatcttctgctgcagcagcctccacactcattcccggcaccatagccactgccatcggagccatcatgctcaggcacagtcccagcacaattcctttcattccccacttattcattgctcatcctccttgtattcacttctgtcctcgatcttcacgatcttaccatctatgatatgaaagatgcggtctgcaaatcccgccagatggttgtcatgggttaccatgaccattgtctgattcttctctgtcacaacttttctcatcaatcccagcacctctgctgatgttttggaatccagattaccagtgggctcatccgcaaaaatgatctccggatccaataccagggcacgtgccacacccacacgttgctgctgtcctcccgacatctcatttggccggtgcttcatgtgtttaggaagtcctaccagcttcagcatctccactgccttggcttcccttatcttcttatccactccccggaatgtcaacggcaatgctacattttcgatagcattcatggttcccagcagattaaaggactgaaaaataaatcccacatgttctctccggaacttgacaagctgattttcattcattttttccagatgctcgccagccacaatcacttcgcctttggtcggcttttcaagcccggcaagcatgttcagcatggtagattttccagaaccggatgtaccgacaatcgcacagaactcacctttgtagatagtcagatccacaccgttgagcgcacggactttttcattgcccacccggaatattttatagaggttcttcacctgaatcgcaggttcccgtgtcttttccacgcttctcctcctgtatttatagaatattagggcatggttccggttcaaagggaaccatgccctatacaaagtatatcatagattaatctatataattcttaattaatcttaattttattctttttcctattttttcaaatgctaattttcctcagtactacaggaaagttcacttttgaaaataatgcaaaatcatgtcaaaacataagatttagtaacaatttagtaacacgatttatgcctgaacaatataattggattaagtgttgggcaacatgcgcggtgtaatgaaggcggctgcccaaaacctagcccgcgagttgctaattgaatgatgtatttggcagcaaacgcggcatagtgggagcggctgcccaaaatctagcccgcgggttgctaattggatgatgggttgggcagcaaacgcggcaaactaggagc

SEQ ID NO: 4520 - DNA, 11043 bp, Unknown
  16S sequences of unknown bacteria
cctcctcgtcgtccgggcaacgggccgccatggtttctgccgaaaaaacaaatttccctcccggggcaagcagatttcttatttgctgcagcgccctctcgcatgtggaaaaatcggtaaacaaagacatggaaccggaggtaacgaaaatataatcgaacttctcctgcggtcgatacgtctccaaatcggcctgaacaagctttgcgcccggcagtttctgcctgcatctttccagcatttcaccagatcggtccattccgcttatgtcaaaacccttttccgaaaacgggatcaaaaaccgaccgctcccgcacatgggttccaaaattcgttgccctttttccgcataggaaagatagaacgccaattctttctccggcgccttttcatggagaatctcgtacatttcggtacataaactaccgtaatcatttttttaaattttgtccattttttcaccttttgctgtccaatctttatcatcaaatcttcttactgttcgaccggcttatcctttttaaaaataaaaagcttgctgaacaggtagttgagaataatcaccaccacattggccagaattttaatcagcttatctggcaaacccagtaccgaaacgcacaaaaacataatccccatatcgattgcaccagacagcaacctgcatccgaaaaaggagccaatttcccgcaaaattgcctttgtgccggaggctgtgctttgaaacacccaaacccgattggtaaaataagcaaacaataccgacaacacccatgcaatggcggtgctcaccaaatattgaatttcccccacatcggtcagcacaaaatagctgaagatattgaccagcgtcgtcaaaccgccgaacaccaaatacaaaatcatttcccgatactttcgatataattccagtgctttttccaccatatttttctctccttcgctctttggaaagcagttttctcaaagggaactttccgccctgctttttcatggcgcaaacttctgtaaaagaaaactctgctgttggacatattgtttccagaataccataaaagctttcccctgtcattcattttccttgcgcgccgtttcattttggcctataatgagcatgttaggagtcggtgccctatggagaaaaaacaaaagctcgtatggtttgccaaacgctgtgcccttgccctggcggtggctgcgctgtgctatctgttgttcggcgttatcggcggctggtgtatgtttcgccgggtcaccggcctgccctgcctgacctgcggcatgagccgtgcctggctgtgcgctcttcggctggattttgccggcgcctttttctggcatccgctgttctggaccgttccgctcattgcccttgccctgatttttttcggtgcacgccgccgatgggtccgccgaggtctgatcgcttgtctttttttatttgcagtcgtttgggtggtgcggatgcttttgctgtttccccataccccgccaatgaccgccgatcccggcggcattctgccgcgccttacgggtgcgctcttctgaatttgaaacgggaggtgtctttcctttgaaagatggttttttgaaaacggcggccgccacaccggcaatccgactggccgactgcgcttataacgccaaacagattctcctttgtatggaacaggcccgccaaaaaggcgcaaaattgttagtgctgccggaattgtgtgtcaccggatacacctgcggcgatctgtttctgcagtctgccctgctcgaacaagcccaggcagcattggaacaaatccgcgttggcagccatggctcggatttgattgctgttgtcggcgcaccgctcattttcgagaacaaattgtataattgtgctatttttatacaaaatggccgatatcttgccgccatacccaaaacttatctacccaattatggtgaattttacgagttgcgttggtttactcccgctccgctccaaaacggcaaaatctctattggggaagaatcactaccctttggcacccgtattttactgtgctgcgagcagcttcccgggctgtgtattgccgccgaaatctgtgaagacctctgggcggcagatccgccttctaccaaacacgccattgccggtgcaactgtgattgtcaatccctcctgctccgacgagatcatcggcaaggctcagcaccgccgcagcttggtcagcgcccagtcggcccgcctttgctgcgcctatttgtatgctgatgccggcgacggcgaatccaccaccgatctggtgtttgccggccacaacctaatctgcgaaaacggtgcgctgctggcagaaagccgactgtttcaaaacgaaatggccattactgaaattgatctggatcgcctagcctttgaacggcgccggatgaccagttttcctccggccaaagatgaggaatatcaaaaaatctccttctctttgcgcctgtctcccacccaactaacccgtcctgtccatccttatccgtttatcccctcctccgccgacgaccgccgggaacgctgcgaggaaatcctcaccatgcaggcagccggcctggcccggcgtttggcacatacccatgcgaaatctgcggtaatcggtctgtccggcgggctggactccaccctcgcactgttggtagcggtgcgggctatgaaaaagctgggccgcccagctggcgatattctgacggtaaccatgccctgctttggcaccacccgccgtaccaaaagcaacgcccagcgcctggccgaggcttacggcacctcttttcgcgaggtggacatcaccgccgcggtaacccagcacttctctgatatcggccagaacccgcagaaactggacgtgacctatgaaaattgtcaagctcgggaacgtacccaagtcctgatggatttggccaatcaaaacggcggcttggtcctcggcactggcgatctgtcggaattggccctcgggtgggctacctataatggcgatcatatgtccatgtacggcgtcaacgcttcggtcccgaaaacgctgatccgtcacatcgtcgcttacgaagctgccgcttgcggcgaccctgcgctgcagcgcacactggaagatattctggcaacgccggtcagtccggagcttttgcctgccgacaacggcgaaatctcccagaaaaccgaagatctggtgggaccttatgccctgcacgatttctttttgtattacgttgtacgctgggcgttcgcgcctgccaaaatccatcgattggcttgttatgcgtttggcagcgcctatgatcccgacgagatcaaaaaatggctggtcagcttttaccagcgttttttcgcccagcagtttaaacgctcttgcctgccggacggacctaaagtcggttcggtcagtctttccccccggggcgactggcggatgcccagcgacgcctgcgcaaaaatctggcttgcccaagccgaagcgctttagtgcatgcgaccgccgccagttcgtataaactggtacctactgcttatttgtgcagctgattcatatcttttaaggcggcataatatcacgatgccgcctatttttattgcgtatccgaataattaaattcaaatatactataagtagttattttttgtttatctatgctcccaccatcttcacaaaaaattcacttgacttggagtccactctcaatcgtaagatgaaaaacagaaaagaaaggactggtcttgtgaaaaaatatattgcctttttgttgtccggaatgttgtttcttactgcctgttctgcctctttcgattcaggtgcgtccgtgcaggaaaacgccgcgcaaagccaagagactcctttggaaagcagtgttgcgcttttggcttccaacaccgtggcgggtgaaacggcctcttccctcgcttcgcaaaaccagaaaactgacaccgttccctggcggacagatttacccgaaaatcatcagatggatccggctgttttttctcagctgcatacggatttggaaagttctgacgtttatgctatggtcactgtaaaagacggcgtcatcatcgacaagttttatcaggatggctatgacgaaaacagcgttttccagttgaactcctgtaccaaatcctttaccggcgcattgatcggcattgccatagaacagggatatctcggcggtgtggatggccctctttccgattatctgccgcaggtgcttgacctagaagattccggaaagcagcagattaccctgcgccatctgctgactcacacctccgggctggaatggtatgagtgggcgggacgcagcaactggcaggaattccgcacttctgaaaattgggttgattatattctcaatcggaatctgatctccacaccgggcagctcttttgcttacagcaccggcaatagccatctgctggccgctgcgttggaaaacgccaccggtatgggcgaattggaatttgcccacaaaaatctatttgacgcgctgggtatgaccagtgtcgtttggggtatggatccccaaggcgttgccgacggcggaaatggaatcgctatgaccgttcaggatgcagcccggtttggacagctgtatttgcagggcgggcaatggaacggtgaacagctgatccctgctcaatgggtggagcaatctactaccgcgaaaaacaatggcgctggcgatggtaccagttcctacggctaccaatggtggattcgctcctttcagggctatgacaccttttacgcctttggcgcacatggacagtttatctttgtggtgccgcagctggagctagtaaccgtcattgccagtcattccctatctgacagctatgcgccccgtccatacttttccgactatattctgtccgcttatacaggatagcgtaggatcctcttttttcccgtttttacccaaccatttatatggcaaaaggcgctgttttggagtgaaaacggcgcttttcccttcattttttgctgaaatactctcgattttcagttgataaaataggtcaaatcttcctgactaagtcctggctgaagcgcccggttgattgccatagccagaattttagatgcacgtccgatgagaagatccacctctttcggtgttaccagcatcgattgcccttctggtgcaaaaagtgcccgggccgcctcttcgtcatcgactccttctaccgccagcagatcacaccctactgtcacgccgtctgccaccgtgggcactcccatagagattaccgggacacccaacgtttgacggcttagttcccggcggcggttcatagcgccggagccgggagaaatacctgtgttggaaagctgtaccgtccggcccagcctctttaaactgcgcgctgccagcgcatcgatgataattacgcaggagggctttattttttcgcaaagacatgctataatttcacttgtctcaattcctgtctgccccaaaacgccgggtgcaatggccgcaactggccgaagctgatccttttgggcggctttttcccattctccggcaagatggcgggttgctaaaatcccgtcaattactttggggcccagcgcgtccggcgtaatggataaattccccagcccaaccaccaggaccaacccatcctggccgggcaaaaggcttttaatctgccgggcaatgacttcggcctcccgggccgaatcggtgacagaatcagaaaacggaacaacctctacggtgatgtaatcgccggctggttttccaaactgcctttcccctgccggggtcaggattttggtatggaaaactactgcgccgtcctcttctttttggactgtctggtaatcctgcgagaccgtatcttgcagctgctgcgccagttcgattgctaaatcggttctgaaattcattttgttgcctctccttcggaatattttttactggttttctgttttttttgcggaaggccttgcaaatctgtctttaaaatgataaactaattttgtattgtgtggtcaaggaggtgtcaatattggcaaacatcaaatctgcgaaaaaaagaattctggtcaatcaggcaaaaactgaggaaaataaaagactcaaaaccaacctgaaaaccgttctgaaaaaagcggaagctgcgatcgaaaccaacgcagcggacaaagatgcggcggtgaaactggcggtgaaaaaaatcgatcaggcttgcgccaaaggcattctgaaaaagaataccgcttccagaaagaaatccaaactggctttgcatgtaaacaaagccaacgcttaatttttcattttgcacaaacggcagccggatacgttagtatccggctttttgttttgaaaaggttcccttatagggacaatccgatcagaatctttcgccgcctgtacctattgtctggtacaggcagcgaaatactttaaaggcggaattgccacaggaaaaactgtaaaacaggcaaggtgcttacagggagttcctgtcaggacttatcgccggggttaaagatcaacgccaccagcagtccaaaaatcatcgctgcggtaattccggcagcagaggcagtgagcccgccggtaagcgcgcctaaaatgcccttttccgccaccgctttctgcacgccggttgccaacagatggccaaacccggtcagcggtacagttgcgcctgcccctgcaaactccacgagcggctggtataaacccagcgcggacaaaagcacaccagccaccacatagcccaccaaaatccgtgcgggggtcagcttggttttatcaatcaagacctggcccacggcgcaaaacaggccaccgaccaaaaaagccttgcccaaagtaatcaaaagctccattattccacccccttgcgccggcggctggaggacagatgcactagatgcgcaatgccaggaatgctctctccctgcatactggaagtaggactcatcagagcgccggtagccacaaacagcacgtcccccagtgttccctgccggattttgggcaggataaaagagcacagaactgatgcggcacaaccgcacccagatccaccggcgtggacatcctgctgctgccggtcatagatcaacaggccgcagtcctgatgccgcccctgcagatggattttctcctgttccagcagctgttctaacagcgccgaccccacttgccccaaatctccagtaaggatcatgtcataatcttccggtttcgtacgggtatccgccaaatagcgggaaatggttttggcggcagccggagccatggcggcgcccatgttgttggcgtccttaatacccagatcttcaatacagccaagcgtcaccgcccgcacaaaaggcgcagcgtccgactcgcctaccacgcaggcgccagagccggtaacggtccactgagcagtaggcggtcgctggccgccgtattccagcgggaaacgaaactgccgttctgctgagcagaaatgagaagaggtcactgccagcgcttttttggcaatggccgtatcgacaaacaaagctgccagcgccagcgactccgccatcgtggaacaggcgccgtacagccccacaaaggggattcccaaatcccgcaggccgtataccgaaccgatgcactgatttaacagatctccggcaaaggccatatcgatttggtccgcttcaaaatttcctttggacagagcctgtcccacgctgatctgcaccattttgctctcggctttttcccagctgctctccccaaaagaggagtccgggttgatcacatcaaaatattgcccaagcggcccttccgactcttttttggaccctactgcgccaaaggagagtaccgaaggcgtattctccagcagataggtataattccctgttttaactgccattttctccttccccctaaccaaaaatcgccaaaatcagaccgtagatcaccgaagcaacgcttccgtatagaatcacaggtcccgcaatggaaaacatctttgctcccacacccaggatcaatccctccctcttaaattccagagctgggctgaccatagcattggcaaagccggtgatagggaccagagttcctgcacctgcatgtttggcgatatcatcatagcagtttaaccccgtaagcagcgcgctaaaaaaaatcaaagaaatagaggtaactgctccaccatcttcccggcccagtcccagggattgcatccagctcataaccccttggccgacggtacagataaatccgccgattaaaaacgcgaccagcatattgcgccagagtttggagttcggggctgccttttggctcattttattgtattcctgtggtgtaggagacatgaaatcatcctttccttctaaaaaatcatttaccgctattttctctggtcagatcgattttatgtatttttcgcccatcctggacagaacacggagattttttctttgatttgcaatcctgcaaaaacaccgtgcataaatcacgtgcggaaaagccatacttttggtaacataaatttttgtatgaattgagggaaatcctatgaaaaaatctttttccgaaagcccagtgggaaaattccttctggggaaaggcttttacgccgcgttagcggtctgtgtattgggcgcaggcgcagccgcctgggtgattgtggacaaaaccatcgattcttttaccagccagccgccggcggtctccggtacaaccctgcaaaacaccgcttccagcgcgccggcatctcaaaaagaacagcaggtggagcagaaagtctccaatgtatcgcggccatcctcttcctcctccagtgcgccttcctcctcttcggcgccggaagcgtcttccgcggtttccgaagaatccgcacaggataccatttctccaaactacggcgtatcctcctttatgcttcccgttgaggatacggtttttaacctcttttccggtacagagctggtcaaggatgaaacattggacaaatggcacacccataacggtatcgacatcaaagcggaattgggcgctcccgtccgggcagtagccgatggcgttgtttccgctgtgaaagaggaccccatgtggggcacggttgtggaaattacgcacgcagatgatctggtcagccgctactgcggtcttgacgaggaactttctgtggcggaaggacaggcggtttctatcgccgatgagattggccgggtaggagatactaatctggcggaaactgccttggaaccgcatttgcatttcgaattgtttgaagatggcgtgcgggtggacccgctggaccggatgggcttttacgaatcggacgagtaaggcttgactttctctttctgtgctgttaacatagaagccgcagcgggtttgtccgcgcggcaactatgcaaagggttgatcgaatgaaaaaaatgccgtttccattgaaacgttttaaagaaaaagcagaccgtttccggtctgctttttcttttgccctttagcagaataatacggtaagaaaacagcaaaagaaagggtcttgattatgaaaagcaaccacgctctggcaaaaaatctgatgaacctagcgctgattctattgggaaacgccatttatgctttggccgtgaccatgttcatcttacccgctggtctgatcaccggcggcaccaccggtttagcattgtttttctttcaccagtttgggctgccggtaaccgcttttgtctcggtttttaacgttgctatgttcctgctggggctttggattctggggaaaaaatttgcactgaccacactggtcagtaccttcttttacccgtttattctgggggtattccaaaaaattcctatgctgactcagatgacggatgaccggctgctgtgcgctgtttatgccgggttgatgattggcttttcgattggcattgtcattcgtgcgggagcttctaccggcggtatggacattccgccgttggttctcaacaaaaaactggggctttctgtctcggctaccatgtatgcctttgactttacgattttgcttttacaaattcttttctccgataaagagcaggtcctttatggaattttgctggtcatgatctacacgctggtattggataaggtgcttttgatgggccaatcccggacacaggtaaaaattatcagcgaaaagtatgaacagatcaatgagcagatcattcgccggctggaccgcggatctactttgattcacgcgcagaccggttactgccggacagaactgccgatgattctgtcggtggtttccaatcgggaactgccccggctgacccggctggtaagcgaaatcgatccggcggcttttgtggtggtcagcgcagtaaaagaagtgcggggacgcggattttctctaaacaaggaatatcgctgaccagtctagtgccgcacaccgcaggcagacacttcagattttagaatatatatggccggggctttggtgcagcccaaacccaatggattcgccctgccggcactgatgcaggtcaaagaggcatattgtgataaatgatagcttgaacaacatctcacaaagcctcctgtcgctttccaaaggaaaatacacagtctccttccagctgcatccaaagaaaatcccaaagggagaaagcgaaaggagataaaaaccaggttcgcagcaattttttaacgggatgtcatcgcatcaaaaaaatagcacaagatttttacgctggaacaaaaaagctttttgtccgtcaaaaaaacggtatgggccgggatatttaggcgccaataggttccttgaaaataaaaaagcgccattgtggcgcttttttctatctgtttttttctcttgcatatttattttttgtagccattccaccccggatgtgccgctcctgtttattggtatccatcaactctttgacctgccggtaaagctttgggtttatttttttcagccgctccgatacatctttatgtacagctgttacaaatacgaacggtttcgtcaagccctaactctctgaagagcttgaggaagacctca

SEQ ID NO: 4521 - DNA, 14497 bp, Unknown
  16S sequences of unknown bacteria
gggcgcgccgggcgccggtctgctgaccaggtccgcggcccgtcgggccgcattttttctaaccgttacggcgctgtaacttttcaagcagctgtgccgccaggtaccttgtaaatttcatatgtaccgtcttgctgccattcgtgatacgcaagtttttgtatcttttttgtaatgaatttcatttttttcgcttcagatattgacacagcggatacaatgtgttacaatttggttacattttgatcagagggggtatggtatgtctgataaaaatgaagtcctgacctataaaggccgcccgctgatgcggaaggacaatctgatctattacggatccatggccgatgcatacatcgtcatgcttcaaattttggaaagcaagaaggtcggtgacatggatgtcgcctctcgcgttctggtgcagctccagctgacagacccgtctgtaaagtccagaagcagagtcgtgaagaaaagcgaaaaagacggcatctacaccgcgcttgatgttggcagcgtatggcttgagcgagccctgcatgccaaataaacagtaagacggaggtacatatgaaacgattgcacaaatttttcgctgtgacttttctgatcgcgctcctcaccatcgccctggccgcaacggctggcgcgacggagctgaaaaccggcatcgggacggtcactgcttcctctctccggcttcgtgcgaagaacaataccggcgctgatattctgaccaacgccgcaaatggcgaccaagtcgtcgtccttcgtaaggttggagattggtatctggtcgattacaacctgtacatcggttacatgcatgccgattacataacggtaaaagacagagaaaacattgatcttggcaatggttccatcaatcccgctgtggtcaatctacgcagcggccccgccacatcttccagtgtcgtgacgcaggtttccggcggtgcgttagtcgatatcatcggcttcaactgcaactggtacaaagttgtatacaacggccagaccggttacatccgcagcgatttggtcaccctgaccgaaaagccttcttgcaattccggcaccgcctgctccaccgcaggcgtgtccactgcggtaactgcgacctcgactgccataacgacgaccacttccagcgctcccgctgccagcgccgccgcacccgcagtctccaacacttctacggcacagcagatcgtggagtttgccaagaaatacgttggttatccctacgtatggggcggaacctctccttccggctttgactgctccggtttcacctactatgtcttcaagcagttcggctattcgctgaaccgtaccgctgccgcccagctgagcaacggctacgccgtctcgatggcggatctgcagccgggcgatctggtcctcttcggcgggacctacgcctcgaacgcagcagcgacacatgtaggcatctacattggcggcggccagtttatccacgctgccaattctggcaccggcgttgtcatctccgcgctgagcgagagctactacgcaagccgctttgtcggcggccgccggattgtctgatccacacccggcatgagaccccggagaatgcgaatcgcgttctccggggctttcttctgcaataatatccctatttacctatcggattacagtgtttttgtgaagctttcccacttgcttttcatcctcttaaatactataattttaataggtaaaacatagcgcaggcggccctgccttgggccccacaaaaaatataaacaggagatgagcttatgcagcgaaaaatcaccctgctggacggcgcagtcggcaccagcctgtatgccaaagcagctgcccatggtatcgaagagcacgacccggtctgggtcttcaatctgcgttacccggacctggtgcaggagctctgccgcgactatcacgacgccggttcgacgtacatcatggccaacacctttaccgcaaaccggcagtctgtctctcacttttccaactatgccgtcgcagacgttgtcaccgctggcgtccagctggcaagggacgccctgcagggcaccggggcaaaagttggcctggccgtcggcgccctggcgcaactgatgaagcccttcgggcccctggagcctgccgaggctgcctccatcttccgggagcagatcgagcccggcgtcaaggccggggcaaactatattctgctgcagaccttcttcgacctttccatgatggaggtagccgccaagatcgccgtggaatacggcatccccgtctactgcatgatgacctttgaaaagcgccgccggacgatcatgggcaacaccgtcaagcagatcattgataccctcacccccctgggcatccagggcatcggtatgaactgctccctgggcccggaggagtccctggaggtgattgaagaatatcacaagctgacggctcttcccctgatgttcaagccaaattccggcaagcccatcctggatgaaaacggcaatacgacccagccctatacaccccggcagtttgcggacgatattgtccccgcactttcctacgtcgattacatcggcggctgctgcggctgcgacgccagctacatccgcgccctgcgcgacaagctggacaccctcggcctgcgctgatcgccgccccataaaacacgaaaatcccggccctagaacgggccgggattttcgtgttttaatcaagttaatcaagccgcagtatctggctgcgtctctgttcccggatcggtttcaccggtcgcgctgccgctctcgtcccgggtgccgggcacctgggcttcgggcgtgtcgccgacgatgtcataatacaggtcccacatcgtctgaacgccgcaggagggcacggtgtggatggcggccatatcgtcggtataatcccgcaagcgcatgccgtaaaacagcttgccctgctggccctgcttaatccaggtcatggtcggctccagggcgtactccgtaacccgggtgccgtcgtcgtccttcgtgatcgtcaggctggccatgccgcccagcatctggtaattattcgactggtgggagataaaattgcccagggagtagtagcagatcatctcgttgccgttcttccccgtcacgacatccagtggctccagcacatggggatgcccgccgatgacgacgtcgacgccctcgtcggcaaaaaactgggcccagtccagctgatcctgcaccggttcaaacatgtactccgtgccccagtgggcaaagacaatcaggatatccgagcacgccttggcacgggcgatatcgtcagcaatgcggtccttattgtccagcaggtcgaccatccagtcctccgtcgcaatgaagccgttcaggccgtaggtataattcaaaaaggagatcacgatcccgtttttgttgaccgtccggatcttttttgcgtcctcctgggtctcgtggatgcccaggacagtgacgtccgggtattttttccagaaattcagcgtgtcataaaagctgacctcgcccttgtcccaaatatggttcgttgcgtgggtgacgacatcgaaccccgtctccaccagtgcgtcgccaatggccgtcgggccgccgaagcaggggtagttgctgtactgagctgggtcattgacgaagggcgtctcctggttgatgcaggccaggtccacgctctgcacgcagtcgcggaaatagtcgaacatgtaattaaaatcatagctcccgtccgcctgcttgcccgcgttgacgcaggtgatgtgcatgagatcatcccccacggccatcagcgtcacggaggacggctcccgggctacagtaaattgctccccctgggccggctccttgctggctgccggtgcagcaggctgacccgcatgcaggctctccgaagccaaaatcgccgtaaccgccagcaccagcaccacagagatcagcagcgcgatcatccgaccattgccaccgggtgccgggcgcttgcgccgggtgggctgcgtttgcgtcgccataagattccccctatcttgcgtaatatcactcttatcttacaatatacaatatgcagcgctgatttgcaagtctgccctggcagaaaaagcacggcagcccgtcacgcaactggcggactgccgcatttttgccgcttacccccgctgcttgcgcagccgggtcagcagaatatagattcccaacagaacgacgattgatccccccagtacgagatacatcgcaccctggccgaccgcgtagtcgaagaaatagagcttgcaatccacactgtccgcgatctgctggacgacgccctccggcagcccctgggcctccagcgcggcaaaggcaccccgcatcgtatggcaacgcagcagcgccgtgccataggtcccgggcaggaacagcagcacccgctgcagcccggtgctgaagctggagatcggcatatacgccccgcagataaacccgtagccagagctgacaatcgtcccgaccgcggagatctgcccctgggtcgacagaaatagattgatgatcgatgacagggccgtcccgaaaaacaccagcaggacgatatcccccaggagcagcgccacatccccggcggtgagataccagcccaccttccccaggtacaaaagcccgagccccgccgcaacgaggcacaccagaagcgtgctgcagagcgtcgcgcagtaatagcccagggccatcgtcgcaggcttgacgggcgtcagctgcagatcgcgccgcgcgccggcgaccttgtcctgcaccatcagcatattggagcagaacgccaccgtgacacagctgaccgccagcagcgaggagaccaactgcccgccgaccagtccgcccaggagtttactatccagcgtcaaattgctaggcagcgaggatgtgaatgcgtcccggtagacgccagccaggaaggtcgtatagagcaccagcagcacggccggcgtgatgagcgaggtgatgaacatccccttatccttaaaaaatagcttgcaatttcgccggatcaatgcatgaagaccagtcattttgccgcacctcccgtcagcttcttgccggtcacagccaagaatacgtcgtccatcttgcccttggatatctcataatcccggaacagcgccgggtgctggacgataagcgccgtggctgccgccgtattgggcaccgccacccggatcccgtcgtgcaatggcgtgtacggtgtcccgaggacatcccgttcctggtctgtcaggccgtagagggtgataaaatcgccggtatagcggtttttcaggtccagcggcgagccctccgccgcgatttggccgcggtctaggatcacgacatagctggcctccgccgcctcctccatataatgggtcgtcaaaaagacggtcagccccgcctgctgctgcagctgggtgatgacatcccacagcaggcggcgggtctgcgggtccagccccgtggtcggctcatcgaggaccaggatctccggctggtgcagcagcgctcgggcaatgtcgatccgacggcgctgcccgccggagagcttgccgaccggacgattcagcaaatccgcaaaatccagaagctgcgccaactccgccagccgcgcgcggaacgcagccccctggatgccatagagcgccgcccggctggccagattctcccgcacgctcagcgcccggtccagcaccgagccctggaagacaacgcccagcttccgcatcgcggcccggggctcccggcgcatattctggccgcagaccaaaacctcgccgctgtccggcgtcagctgcccgcacagcatagcgatcgtcgtgctcttgcccgcgccattgacgcccaaaaacgcaaacagctggccccggcgcacctcaatgctcaggtcccgtaccgcttcaatctgcccaaaggacttgtgcagccctgttatttgaatcacttgctcttgcatcctatccttccttccctgttatgcgattttctcgatctgcggcctgctttgccaaaaagcacgccgccgcgtcctgcagcatggcgtacgcctgctgcttttccacctgcagcaggccgttcagcgtcagagacaccaggccctccgtgtaaacaatcaaaaacagcagcagctgctcggccacatcccgcggcaattgcagctgcgccgcgacgccgtccgcagcccgggccttggccgccgggtcatacagcaggccgatgccgccggcagcctgcagcgccgccgggtctgcccgcagatagcgcagcagctggggcgtatccaccgccagatcgacatacgtcgcgccgatgcgccaaaaatccaggacggcgtccgccccctttggcttgatccgctgccggacagcctccactgcatattgaaacagcgcctgccgataggcctccatgctgccgaattgccagaggatcggctgggtcgagcaccccagggacgcggccaagcgcttgatctgcactgccgccgcgccctcgcgctcaatcagctccaggcccgcctgcagtatctgcgcccgggtgatctgaattttccgccccaattcgcgcgcccctttctataattttgtttatataaatcagtttacactattatgcaagccctgtcaagtttttctttgcaaattcctgaccgccctgcataatgagcatgagttgattgccatgaagctcctgattgcggaggacgagcccgacctagctgaggccctgcaaatctttttcgagaaaaaccaattcaccgtcgataccgtcttcaacggcgccgacgcttacgcctacgcccagtccggcggctatgacgcactgatcttagatgtcatgatgcccaagctcaatggccttgccgtcgtgcggcagctgcgggcccagggctttgccggccccatcatgctgctgaccgcccggggcgagaaggacgaccgggtcgaaggcttcgacgctggggcggacgattatctccccaagcccttcgcgccggacgagctgctcagccgcgtccgggcactgctgcgccgcaccggcggctatacaccaacagtcctgaccttctctgacctcgccctggactgcaccacgggtctgctgtcctgcggacgccaggccgcctgcctcagcgagcgggaatttcaggtcatggagctgctgctccgggccccggcccgcctgtttccgacggaggagatcatggagcgcgtctggggctgggacagtgacgcggagatccacgtcgtctgggtgcatatctccaacctgcgtaaaaagctgcaggccatcggctcccgggtcaccatctgcgccaagcgctccatgggctaccggctggaggagaagccatgatccggcggcagctgcgggcccaggcccaccggggcgacgccaccgccgtctgccccatcccaggcatgatccgcttcaccgtcacgcttcgctcgatctaaagcaaaaacacaaagccgccccagcgttctgctgcggtggctttgctgcgtgtgtcaaaaaatatttgacacacgctcaaacgcaacccgctgcgctgggctcgcgtttgaaggaactgcaccctgctgcgcgcataattttcacgccattggcgtgaatattccacacttgcagggcgagaagagtttttcccgactatgcgctgcatgggttcgcctttgccaatcgcgctgcgcgctcttggagtctcacccacttgccgccggaaaaaacagattggaccttatttgcgccgtgcgcggcgcaaactctgcgaggctttggggacaatccgtacaaagccaccccagcgttctgctgcggtggctttgctttttggggcgagttcgggtataataaatgaaagcatacaaaatcacacaaaccgagcgggcaggcccgtagaaaggagcggatggaacatgctctggtattggatcggcctggtgctgctggcggcatttatttgctgccgcctggcgttttgggtgcagcgcaccgatggcgacccctttgccttcccccggggcagccaatatgccccctaccgggccgaagcccggcagctggtggaggacgcgctggccgtaccctaccgggatgtctggacccaaagcccagacgggctgcagctgcacggaaaattctacgatgccgcaccggacgctccaattatgctgatgctgcatggctacaaaagcaccgccgagcgggatttctgcggcggcctgcgggaggcccaggctgccggcttccgagtcctgctggcggatcagcgggcccacgggcgcagcgcaggcaaatacctgaccttcggcatccgggaacgggaggactgccgggcctgggtgcagtatctgctacaagcatacggaccggagacgaaaattttactctacggcatctccatgggcgcggcgacggtcctgatggcggcggggccatcactaccgccacaggtcgtggggatcatcgccgactgtggctacacatcgccccgggcgatcattgagaaggtgctgcggcagatgcactaccccgtccagcccctgtactggctcattcgcctgggcgggcggctgttcggcggctttgacctggaggaagacagtgccctggccgcgatggaccgctgccagaccccggtgctgctcttccacggcagcggggacaaattcgtcccctgccagatgagccgcgacctctatgcccgctgccgcgcgccggtcaagcgtctgtgtgtcatccccaaagcagggcacggcatcagctatctgatggacaaatccgcgtatctggcggcgctctctgaatttctccaagccatcggcctggggccgctgccgttcagcgcagattgactgtaatatggcagcgcccctatccgcgataggagcgctgccattcttttttctaaaaaccggaatttatctggatagtactaggaccccagagcaaaatgtgaccttctcaaagtacaaatcaggaaacgccgcgcttaattcctccgcaacacaatagatctcatcgccatcccaggcatcgccgctgcctttcttgcattgcgcccattcctcccgcgttgcaaaggcgacatctccgatcaggatcttcccgccctcattgaggcgatcgcgcagttccttcaaaaaattgaccttttgcggatctgtcaagtgatgaatggaataagtcgccacaatgaaatcatagcgcgcttgcctgagcggttccaccaagccatgcgtaaaatctccttggtaaagatgggcctccggcattttttcagaagccaattcaatcattcttgctgaaaaatcctgcccataaatatggcagccgtgctcatagagctttctcgttagcgtgcctgtcccaaacccgatgtccaggacgacggggttcggcttttccaggatcgttttataaatcatgctgaggagctttttgtacccggcaaatggataggtattctcttcctccgacagcccaaccgaccggtcatatccatttgcccataaatcaaagcctttgtgatctaacatatctgcctccgtcgccactgattcctgtatacgacaccatccaaaccaggccgctgacgcattcaatccaaggggagcagcatcaaatcaaagtcaaagcgctggccgccgatgcggaaacagtccggatgggtgcagagcttttgaaagccgaatttctcatagagccggatggcacgggcgttatcgctgcggacctccagttccagctgggcaaaaccgttttccctggcaaaggcgataagctgcgccatcagcgcgctgccgatgccccggccccagtgggcttttaatacagatatgccgatgctgccacggtggcgcatccgccgaggcaggcgctccacgctggcatcgccgataatctggccgccctgctttaccaggagcattaggcaatcccgcgtgctttcccgggccgctaaatacgctttctcctccgcgacggtgaagggcaagccctcagcgccaaagctcaggttgtccgtctcgccgccgagctgctttaaataatccaaaatagccgccgcgtccgccggtttggcaggcgtgatggtgtaagtctccatggtaacgactcctttctggaaatccgatttggaaattggctctattatagcgccacacccgcgtgcttggcaagcagaaaaaccacttccctgggtcatcgcttgacaagccccgcagatttttttatacttaacaagctgtgccttttgcacggcggcaatttgcaacagaataaaggagcgaaaatgtggagagagaatcttttaaatcccgactgggtttcctgctcgtcagcgcgggctgcgcagtgggcatcggcaatgtgtggcggttcccgtttatcgtcgggcagaacggcggcgggctgtttgtgctgctgtatttgatcatgctggtggtcctggggctgccagtgctgacgatggagctggccgttggcagggccagccgcaaaagcactgtcctggcctatcgcgcactggaaaagcccggcgccaagtggcatattcacggatggtttgccctcctgggctgctatctgctgatgatgtactataccaatgtctccggctggatgctgaactacttttttaaattcaccaccggtgtatttcagccgggaatggacgcggcggccagcgggaaggtcttttccgatatgctggcagaccccggccagatgggcctctggatggcggtgacggtcgtgtccggcgtgctgatctgcagcgtcggtgtccgcaaggggctggagcggatgagcaaggtcatgatgagcgccctgtttgtgctgatcctgatcctggcgatccacagcttcaccctctccggcgcgaaggagggcatccgcttctatctggttccgaaccttgagacggtcaagtccgtcggcctgggccaggtcatcgccgccgcaatgaaccaggcgttcttcaccctcagcctgggcatcgccgccatggaaatcttcggtagctatatgggcaaagagcacacgctgctgggcgaaggcgcccgtatctgtgtgctggataccttcgtcgccatcgcagccgggctgatcatcttccccgcctgcttcagctacggtgtcgaggtcacgtcgggcccgagcctgatcttcgtgacgctgcccaatgtcttcgtcaatatggcaggcggccgggtctggggtgcgctgttcttcctgtttatgaccttcgcgtcgttctcgacggtcatcgccgtcattgaaaatattatgtccacctgcatggatacctttggctggagccggaagaaggcggcgttgatcaacggcatcgtcattctgcttgccagcattccctgtgtgctggggtataatattctcagcgacttccaccccatcggcgggcgggacgtgctcgacagtgaggatttcctcgtcagcaatattctgctgcccctgggttctctggtctatctgctcttctgcgtcacccgctggggctggggcttccggaattaccaactggaggcgaacaccggcaagggcctcaaggtctcatcctggatgcgctgggtgtttttgatcgttctaccgatcatgatcctggcaatctttatccttggactgattgggtaagcggcaatcgcaactgcacagcgccttccggcctaccgcgcgatatgcggcaggccgatttttctccgccaacgtcagagtacgcagcagacgtcaaagcccagcccacgggtatcgcatagcggctgacataggcacgaatcgccgcacatcccggcgccggacgccgcgatgcgttgcaatggtctctgccgcccggcagcccccctcgccctatccgcagctgcctgcgctgcatcagaaaagcagcagcgcgctccgcgctggagtaaggcgcggcaaagcaactcgcttgccgcacactttgcggcaggccaaaaagataaacaaacgcccatggccacggagccatgggcgtttgcatgtcgagcaaacataaaatacggagtataacttaatagaagcttaaagcagtacgtcgaatacaaagtaagcagcgaacaggacgatcaggacccaagtggtagccttgatttccttcgtacgctttgcagcgatggtcacgattgcataggacagcaagccgaacagaatgccgtatgcgatgttgtaagagaagggctgcattgcaacgcacaggaacgcgggaagtgcgaccgtcagatcgccaagatccatgtgcatcagcggctcgatcatcagggtgccgatgatgatcagggccggcgcagtcgcgcaggacggaatcatcaagaacagcgggctgaagaacagcacgacgatgaacagcaaaccaataaacagagcggtcagaccggtacggccaccaactgcgataccagtggagctttcagcaccatagatggtgacagtggaggtgcccagcagagcgccgacagcagcaccagccgcagagatcgtcagggccttgcctgcgccgggaacgttgccattttcgtcagccatttccgctgcactggcaagaccaagcaggacgccgacagagccgaaaaggtcaacgaagaaaaagctgatgacgacgaacacgacctgcataatatcagcaatgtttccaacgaacaggcccttgtaggtcagcttcaggagagagggctccatcgccttgatggggttctcaaacttgatgagttggtcgggcaggacggtgtatttcaagcccgtctcgggatttgtgacaaagaagccaaggatcgtgacaacaacgatgctaatcaggatcgatccggggaccttcttgatcatcaggatagcggtcagcataacgccgaagagtgccagcagcacgccggggttgcccagatcgccaagggttacgagggtagagggattgccaacgatcagaccggcattttcaaaaccaatgagggagatgaagaagccaacacccgcaccgacggagttcttaattacgtcaggcagatcgtcgcaaattttctgctggacgccgaagaagcccagaacgatgaacagcatgccagaggtgaatacgcaagccagcgcattctgccaggacaggcccaacgtgccgcagaccgtgtacgcaaagtatgcgttcaggcccatactcggtgccagtgcaaacgggaagttaccatagaatgcaattgcgatacaggcgattgccgaggagatcgcagttgcatagaactgagcattcttgtccatgccggcgtcccccagaattgaggggttaacggctacgatgtaaaccatcgtcaggaaggtagtcaaacctgccaagaattctctctttaccgtggtgtgtttttcgctcaggcggaaggtcttgtctaaccagccgcccttagcggtgctttgcgtgctcatgataaatttctcctttttaaaaacattcccataatcatttgtgattattttgcttgccgacgtaaataatctaacatatttgtgcaaattcgtcaacaaaccccgcagagattttttgtacagcgccgcggaattccgcgttttttgttgtcatttatatgtattacatagttttgccatattgaactgtcgtctcttgctccgtcgcttgtatgacgatttttctcaaaaaaaatccacaaaaccgggattttatgcggaaaaccgctttttttagaatctatacacattcacgattccccttgtgtacctctcaggtgtgtattacacatcatcagctcccactagtcacattgtctatattttccgcgttattttgcccaattttttgttaaaaaacagattcttccttccacaataccaatggaacatttcacaaaggcgaaacttactcatattttctggcaaaatctgttggaatcttacgatattccccgtcttttccgaagaagcgtccagtttttgtccaaaactgtctttctctttttggacaagcataaaaaaatacacaaatcccaccgcagcagtatttcttccgatatcctatggcatcgaatcgtgctttttgttccgcgatcccgaatcaacgcccacacatttcactttttccgccgtactcccgctggatactgccccgcaccggcgaatgccgctacctttccctgccacactccgccgcgttcccccctgtaaatgccgaccaaagtgccccattttcgccgcacgttccgccgcaaagaattttgcagcctgtgattcttgccctttgcttggcaaatctgcttcctcccatccgcattttttacagatagtattactaagcagatatgtaaccggttccatattgggtttttcctgcaatgatgcaaaaatcaggcatattcccccgatctatcactccagccttttgacgggaccataagcacgccacgtgtccggccatccatgctacgaaaagaacgcaggaagcccgc

SEQ ID NO: 4522 - DNA, 6402 bp, Unknown
  16S sequences of unknown bacteria
aagcctcccttgtgtaaagggaggtggcgcggcgcagccgtgacggagggattgttttacttttccccgttcctttcaattgggcaacagatgcttgaagccgtacggtgttcgggcatatgtcacttaaatacaaaaccgaaatcggagcttggttttcggtttctttcgcccgccttaaaatcttaagactttcccaccgaggccgaaagaataagcaaggcgtcggccacgtcgacccgtccgtttttattcgtgtcggcataggcgtcggcaaaaatttcaaggttttgcttttccaccgccgctctgagagccataagagcgtcaacggcggtcgtctttccgtcgaaattaagatctcccgcctttgtcgttttcttgtgaacaagggcaaaagagccgtttgagtcggccgtaaaattcacaaaagtctttccgtctttctcggttatgtcggaggaaacttcgcaaaggctgccgtcctcaccgattttcaccacggcggtctttgacggcgaccagcggtcggggagcggagccgagcactcaagcggctcgtccgacggctgcccgttctttgaggcggcaatctcgtatgccctgaacattgctatcgagcgggtgtccttaagactgtcgtaaagcccgccgccgctcaggcgcttgaccgagaagtcggcgtccttcctcacctgtgccgaaattcccgaagtttcgtcggtcaccgttttataagcgcttgtcaggcggataacgcttgtgtgtacgcggacgtttcggtagtagataaagatctgtccgtcacgaataagccacgcggggccgtcgaaggcataatctcccttataggtgtcgtgaagaagatagggcagcttttcccaatttatcatgtcctttgaacgggcaaatttatgtccccagttcgacccgccgaaatcgtagtaataccgcccctcaacgccgaggtcgtcgccgagattgcggtttatcttgccgccgtcggtggatatttcgtagaccatataacaccatccgtcatagtagataacgtccctccgcccgcaggttccgcagtcggggtcgtcgggattgtttgaggtttctatgaccgggtggtcgaccatggtgagattcatgatgtcggtaccgtaggccacgccgatttggcagtcctttttggcgcgcccgaagccgtgaaaggtcatataccacatatctccgaccttgtaaagatcgggagtgccgatgttgtaattttgccagtcgagagagcggtcatgagtcagaatgacgccttttttgtcgaaatgcaccccgtcggtggaagtggcaagagcgatattggcgccgtcgtcggtttcgggaagtgcctcataggtgacataaaagaccccgtcctcataccacacccccgcaaatgcggccatgaggcggtcgaagggggcgtcggcgtcgataaccacgcccttatcctcaaaatgaactccgtcggtcgaggtggcaagtcccacggtagattttccgtccttgccctttatataatagctgtaaagaacgccgtcgacccacacgaaatcgggaaaatgcataccgaaatatcccccgagatcgtcaagctcggggatttcctcctcaaaggtttttccggtgaaaagtccctccaaaagagagccctcctcggcagttatttcctccttgttggaatagccctgtgccgacagggcgcagcaaagcagcattgaaatcacaacggtaaacgcgacaagtcttttcattgtttcacctttttccttttttgaaaaattatattcccctaaagtcgggttaagtcaagatttcacccgtcatttctcttttttgcacaaaaggcaatatttatatttggtaaaaccgtcgaaaaaagggtcggacggtgttgcatttgggcggcacgtttggtattatgtagatattgaatttacgtcgggcggccctttttgcaaaattcggccgtcggcttcgggagttttgtttttggaaaagcgcagtatgttttttaaaggagtaaggcacggcgtgcctatttttttgggttatctttcggtttccttcggattcgggatacttgccgtcaaaagcggcatttcggcctttttcgccacactcatttcgctgaccaatctgacctcggcgggtcaggcggcgggcgtgctgataatcgcctcgggaggaacgcttatcgaaatgatcttgacccaagccgtcataaacatccgctattcgctcatggctatttccctttcccagcgactttcccccgatttttccaccggaaaacggcttgtgctttcctacggcataaccgacgagatatttgccgtggccgcctcccagccctttctcataacccccgaatacatggcgggacttatttcggtgtccaccgtcggctggtgtctcggcacggccctcggcgccgtttcgggaagtcttatgcccgaggtcatcacaaacgccatgggtatacttttatacggaatgtttttggcaataataatacctgcagcccgcaaggagcttaaaattctcacggttgtcgcaattgcggcgggaataagccttgtttttcatttcttcatcccgtcggtggacggcggattttccataataataagcgccgttgcggcgtcggctgcgggagccttgcttttcccgagagaggaaacgggtgagaccgaacaatgagcataataatatacattataaccatggcggcggtgacctatctcataagggcaattccctttaccgcctttaaaaagaagataacctccccctttcttcaaagctttctttattacataccctatgccgtgcttgcggccatgaccgtccccgccatattttattccacgggaaacacggccacggcggccataggcacggcggtcgcggtaattctcgcatatttccgctgtccgctcattgtcgttgcgcttgcggcggctgcggcggctcttgtatccggcttcttcataatttgatttgaacgggcattatgttaaccccttgtttttaaaaattaaaaattttgtttcatctttattaaaacttaattcacatcctcagggtatagtataagtgcagtaaggaaaggggaacccgttatgaacggtgacttttttgacaacaacgagtttgacggcaaagaaaacacaggcgtgaacgaaacgccgcgggacggttcatcctcccaagcctcggatgaaagaaccgacgcgggacagcatccgaccggatatgttcctccccacgccgaaagctcatttaccccaaacacctcgttttccgacccgtcggtgatttcggaaaacgaaactccctatactgcgaaaaaacaaccaaagcccgtgacccgttcgggtctcgccgtggcctgcgtctgcgtggcgctcgcctccagcattctgacggcatcgattttttccttcgggcttgcaaaaggtcagtttctgaacccctcgtcgggttcgacctccacaaagacctcaatcgtcacagaatcgaccgatgaagcggcggttcaggcggttgccgaggctgtttctccttcggtcgtgggcatcgtggtcgctacatcgtcacagagctttttcggaacgggaacctcctccgaaagcgaaggctcgggcataatctactccgaggacggatacatcattaccaactatcacgttatttccgacgcggttgagtcgaacggaaagataagcgtatacctcgagagcgacagcaccaccgccatttcggcaacggtggtcggatacgacgtcagcgccgaccttgcggttgttaaaattgacaaaaacggtcttccgagcataggaatcggcaaatcctccgacctgaaggtcggtcagacggccattgcggtcggaaatcccggtggtatggattttatgggttcggtttccaagggcatcatcagcggacttgaccgtaccatacagcttgaaaataccaccgaaataaacctgattcagaccgacgccgccataaatcccggaaattcgggcggcgccttggtcaacagcagcggccagcttatcggcgtcaacagcgccaagatggcctcggaaaatttcgaaggaatgggctttgccattccggttgacgatgtggtcgaaatatgcgaccgaatcatttccaaaaaggacgctcccgtgggttatgtgggtgtggaaatatccacccgatatgacgcgtccacccttcagatgatgggttatccggcgggcgtggtcgtggcaggcgtcgcggcgggaagtcccgcggcaaacgcaggaatcgaaaagggcgatattatcacccagtttaacggaactgccgtgaccggttacacggtctttaacagtgaaaagatgaaatattcaccgggagacgaggtcacgctgaccgtctaccgcggcggaaagacctactcggtgaagataactctcggaactgctaattcttaaaactcctccattttttaggcctcatcccggggttgagatacttttccaagaggaaaaggtttctcggcggcggtacggcaaatctcttctgtgccgccgaaagggaaccaaattttgacaacgtctaactttttcatactctcctcattgcaagcccccgtcgggtcaaaccggcgggggtcttgcattttatccgttatcacgcaaaaatgcggcgccgaaattcgggcaccgcacctttagacggcggtcgcatgaccgccctttttcttttttaaccctttataaagcctgtcaccgagacctcggccacgggacggttttcggcatcggttaaattcacctcgtaaaagcaggtgtgctttccttccttgacgcgccttgcctcggcaaagagctttcctccccgaggagaggacataaagcttatttgcgatgtgagcgataccgtcattcggccgccgcagtttgcggccacggcaaaggcaaaatcggccaacgtgaaaatcgcgccgcccataacgctgccggcggcgtttaaatgctcctttccgtattccatgctgcagcgggcaaaaccgtcgcccacttcgtcgataacggcaccggcgcggtttacggcaaaggcgtcggccgcaaaaaattttcttgcttcttcaagattcatgtttattcctccgttttaagcgagacctctcccgagcaaagctcctcggttttgcccgaagggtatctgacaaaaagccgataatccgggcaaagccgctcggccgttgcagagagtctttcgtttttctttatgacttcgatattttttccgagcatgaaaagccggcttttatatcgcttgaaaacatattcgccgcttttttcgcacagctcgtaaattttatttattatttcggcgcaaagaatgtttttaatgtttttcggcggcgtttcaaacaaggctcccgctcttctttttatgtcgtcggggaagcctcccggcggcggcgaaacgtttattccgatacctattatcacccgcgaaaggcgggaaaaatcctccgaaatgttttcgcagagaattccgcacacctttttgccgtcggcataaaggtcgtttatccactttattccgatgcttttcccggtaacattttctattgcctcggccgtcgcaagggccgcaagagccgtgatttttgaagggtcgtcggcgtttacgctttttacgacgctgagatacaacccgccgtcgggtgaaaaaaagctttttccccttcgtccgcggccgtcggtctggcagtcggcgcaaattgcaaaatctccgcttttttcgccgctttgcgctctgcaatcggcgtttgtcgagccggtgcattcctttgcctccacataaacgggcaccttcaaatgctcggctgttttttgggcgttcagtctgtccgtaattatccctcccgaaaataatttatcacatttttccctttctttcaagggacttgaatttactcgccgactgtggtaaaatgaagtgctaataaatttaatcggaggacgattttatgtcaggacattccaagtggaacaatataaagcgcaaaaaagagaaaaccgacgcccaaaaggccaaaattttcaccaaaataggccgtgaaatggccatcgtggtcagagagggcggccccgatcccgaaaacaactcaaagcttcgcgactgtatcgcaaaggcaaaggccaacaacgtccccaacgacaacatcgaccgtataatcaaaaaggccgccggagagggcgacggacgcgaatatgaagaaataacctatgaaggctacggtcccgagggagttgccgtcgtggtggaaaccctgaccgacaacagcaaccgcacggccggcgaccttcgccactatttcga

SEQ ID NO: 4523 - DNA, 18311 bp, Unknown
  16S sequences of unknown bacteria
gaaggtgctcacctttttgacgcccttttgcaagacttttttattgacaaacacaagcgactattgaacaatgggatcgccaactcaattcggttagtttgcttgcaagttatggcaaggtaaattacaaatctgcacaaggatatttggattttgcggtcgagctaatgcaaaagaatggtatgaattcttccatactgaagtatgccatcaaggttctaaaggatatgccgttaacagaaaatgctaaacgttgctgcgaaaaaacgatcttccatcttactgtgatttatccatatctagttccgttgttggaggaatatgtttttcaggcattttctgtttccgatagtgcaatcaaaaatattcttgaaatcctgtatgatgttggcaggcaaacccataattatgaaaccactgcttatgttttatactatgccttattgcacaactgccaaattactagcattaacatcaatgacattattactagccaagactgcatttatatgttgatggcgtatctttattgcaagcattggaatatgcaatccgatattaatacgctacatacgtatgctctgggactttcttctaaagatcctaatacgttcgatcctctatgggtttttgcatatgaagcattggacgcaacagaactgaaaggcgactgggttgctttaaaaaaagctaagatttcttttgtaaaacagacgtggtaataataagcatgaaaggaaatagccgatgcccagccgtgccatcacaaagatactgccccaacgtctagcattcgatttgcaccgagtagtgatttattgcagaaccagcacacatacgcaggaacaactgaatagcatgacgaatcaagtttctaagctcacacagctggttgcagagaatccgatgtggacactgtgcgacatttacttggatttccggagtggatcaacaatcgctggacgcacagagttcatgcgccttctggacgatgcagccaatcgaaagtttgatattgttctctgcaaaagcatcagtcggttcggccgaaatgtaaccgaagcactgcaaatgataaaactacttcatcagtctggcgtgcatgtcatttttgaacaggaaaacctcgacagcagcgatccagagcacactttgcttatttcgattatgagcagtgtttccgaagccgaaaatgagaaccggcgtcagaatgtaaattggggtatccagcggcgactggaaaatggttcctcgcgtctgtactcccgcccatgctatggatatgagaacgatgctgctggggaactgaccatcaacgaacagcaggcggatgtcgttcggttgattttttcgatgtatctttccggaaaaagcgtggtcggaatcattgcatcactctatgagttgaaaataccttcgcccacggggaaagaaaaatggtccaaacgtagtatcgaagtcatgctcaaaaataaaaaatacactggcgacgtggtcatactaaaaaaatatgcggacacaaccaagccggttgattcggtttcacacataacatatcttgcaacggcatcccatccagcgattattaccggtgagcagttttctgaagtgcaggctgaacgtgcccggagaagtaatattgttgttgatgaaaatggaagccaccgtaagaacagcaaatacagttcgaaaaaagcgatgcaagcgggcggtgaatcttgtgaggaattcgttttttctcaatcgtaaggactataaattcagaccatttactgatggcggtttgagcggcaataagcaatttgctataccgaaacaaggcgatggtgtggcttatgtcattaagggtggtagcagggagtgtgcatgcaacgagtttatcggattgcgccttgcaaagcttatgggggtaaatgtaccgtgggcttatctggtgtcgcctaaagaaggtgattatgccgtagcaatcgagtatcttatctctcaaccaaagccatgtttggaacaggtgaaagactctgaacaattgctgcacgcctatgttcacggagtgattgcgcactgtctgttcgaagaccgagataaaacggattttctgttttcggatggaactcttttcacatttgactttgcagaaggcttccgttcatcagattttactattatggttatggagcaccaggagcaactctcacatttgttttccaaagatttagttgctcagctggcaacatcgtccttagattattaccccagcacgcttgcggcgtatgaattgcttgttattgatcagcaggtatgtgataaggctttttttgacgctgctctggatgatatgtgttcccgatttttgtctattccaaatgaagaagtcgaaagcatgctagaagcgctgggggcacaatatcctgcggctctcattgatcacttcaagctttacatcgataaaataagagaattctgtcaaaaataagcattttgcacccaaaacaaaacgaaagggctattcgcaaaataaaagccctaatgtcaaaacgaaagcatgagcaatcgttttgttatgcacccaccagagagtgtgggtgcattctatctatacagtttttcagcggaaattcatcccggggatgacggcgaaggaaacatgccggaatcattcatattcccgggtgcatttgccattttgcattaggattctgcaagaatataaagaaaaggactgaaaccttgtatcaaagtttcagtccttttatgtgtctgcactcataaaatgatacaagtaacgatttcacggtaggggtattcaaaggggtattcattggggtatgcagtttgaataccccttgaatacccccttgaatacccctacgaagcccctgcatagctctgaaaaggcaggtgctgataatgctcggatatacattgcgcgcatcatcaaagcacgatgcttcaagaggctctctgcccaaaaatacaaacaacccgcttgcccagcccccggcgaatcacttcgcgcccggctgtgcaagcgggttgttttcatgtgctcatttacaggtcgaccggtatctccgtcccatcccggaagcggaaaatcagtttcttagcgccttttgcttcacccggatagaccacaatgtgatccaccatcgctgcgaaggtgcgttcatcaaagggagccaaagcctccttctcccgcagttgcgccatgaacgcttccagctttcgcctcctgccggccttcgcggccagctgcgctttcagcgcgccgatcttttccttcagggcactgcactttgcgctaagcgcgtcgaacgcccggttgtattcctcctgatcctgcgcgatctcggcattcctgcgcgccatgcgctccatttcctgatgcgcttcgtcgagccttgcctgcgcacgctccagctcgcggtccagctgcgccgtgtcggtcagattggcaatgatcgtctcgtatgcggagaagatctcgctcctgcgttccagcagcatccccagcgccttctcaaaggctgtcctgagttcctcttcccttacgtgaggagatgggcagggcgctcccttcttttcgtacttccggttgcagcggtagatgacactccggtaagcgtccgtgctgtgccagaccttgctgccgaagtatgcgccgcattccccacagacgagtcgcccggagaagggcgtgaccgcgctcgtgcgcccgccccgctgcctgcgctttgccagttcagcttggacaagctcgaacacctccgcgctgacgatagccgggtggctgttttcgacgtagtattggggcgcttcgccttcgttcactttggccttctttgtcaggaagtccacggtgaaggtcttttgcaacagtgcgtcgcctctgtacttctcgttgctcaggatggactttaccgtgctggcctgccacgtcgcctttcccgcaggcgtggggacgctgcgcttcgtcaaagcggccgcaatgccggagggcgtcttcccgtccagaaacatggcatagatctcgcgcacgactttggcctcttcctccacgatctgcatattgccgtccgggcctttttcgtagccgaggaaatgggagtaggccaccgacaccttgccgtccgcgatgcgcttgcgccagccccaggtcacgttttccgagatggagcggctctcctcctgcgcaagggacgacatgatcgtgatgaacagctcgcccttgctgtccagcgtatcgatgttttccttctcgaaggtcacgcccacgcccttttccttgagcttgcggaccgtcgtcagggtgtccacggtgttgcgggcgaagcggctgaccgatttggtgatgatccggtcgatcatgcccgccatggcgtcgtcgatcatgcggttgaagttctttctccgcttggtactggtgcctgtgatgccctcgtccgcgtacacctccacaaaaatccattcaggattctcacggattttcttggtgtagtagtccacctgagcctcataggaggtctgctgctcctcgtcgtcggtgctgacgcgggcataggccgcgacccgcagccgctccatcagagggcgcgcggccgcatagcgccgcaccgtagcggggatcatgcgcaccctcgtgcctcccgttgccgcctcagtcatgccgccacctccgtttcatctgttcactggccttccgacgcatctctggcgtccatgctttggcgcgggattcccacgcccactgacgctcttccacgcgcccgtcccgtagcgcaaagcgcagacagcccttgcccgtcacgcgaatctcatccagcgcatccactgcttcttctgtgagcttttccacgtccagcacctcgcaggtcagggcgatgagcgtctcctccgggatctggctcgcggggcagtaacgctttcccttgcttgaataggtcacgcactgccatgtgtagcgcgggatggagttgcgccccgtggagcgcgtcctgcggttgtaatgcgcgccgcagttcccgcacacgaccttgccgctcagaggataacgcaccgtcgtcggcttgcgtatgttgatcatctcccggcgctgggcaaggatcgcctgcgcgcgctcaaaggtctcgcggtcgatgatggcagggtgcgtgttttcggcataatattgatccagctgacccgtattgcgccgctgtttcttggtcagatgatcttccacaaaggtcttctgcagcaaggcatcgcccgtatacttctcgttggtcagcatttcgaccacatggttgcccgtccacgttcctccgaggcgccgcggtgtattggtctcccgaagccttgccgcgatacggctgctgccggcgccatccagatatgctctgaacacgtcccgcaccacggcggcttcgtcctcgtcgatcacgatctgtccgtccaccgaccggtagccatacagcagcatcaggttcatgggcttcccctcggagaaatccttgcgtatccgccatttgcagttgtcggacacgcttttgctctcctcctgcgcaaaagaagcgaggatggtgagcatcagctcgccgtccccgctcatggagtggatgttctgctcctcaaaataaacgtcaatgcccagcgccttcagctcgcgcaccgtttcgagcatggtcaccgtgttgcgggcgaaccggctgatggacttggtgaggatcaggtcgatctttcccgcccggcaatccgagagcatctgccggaatctgggccggtcgccctttgtgccggtgtacgcttcatcggcgtacacgcccgcgtattcccagccgggttggcgctggatataggcgctgtagtggctgatctgcctggagagggaatgcagcatggcgtcctttcccgtggagacgcggcaataggccgccacacgcttgcggcgaggggtgggcgcgtcgggtttgacctgccggatctgcataggttgttgcttctgttctttcttcaaggcgcttacctccttccgcgaccatatatccctcttttgcggccgggagtcaaccgtgattttgatacaaatcgccccagacaggggagaatctttccgcgagaaactgtgataatctgacgaattccctgccggtcaccagcccggcgttgcgcaggtttctaagaaccgccatggaggtgtgatacgtcagctcgcgttgaagctgctcatgtgtcaacatgggcgcgcccatccgttgttctgtgccgtgcatatcggcctcctcactgctttccaaagcggctgtggatgtaacaggcgtggctgcaaaacttcctgcgccggtcatgcccatacagcggcttcccgcacccggcgcacagagcaggttttccgtcggcatgcgcctgcgtgcgccagtgggcgacgcgacaggcttccgagcagaacacgcgctttttcctgccaggtatacggatgaccggcgtcccgcactgcgggcatattggattctcattttcaatcgtgatttccagcttctgtggcgcacggtagtccgtgaccgccggttcatccgcctcgtcgcggcggcaaaaggatttgatggtgccgaccggaatatcgagcaaggtactgatgcgcttatatccttcacccgcggctctgagctgtcggatgtgccgcttctgctcctgtgtcatagcccctcccttagcgctgctgctttcatatgaaagcagcggcgcaacaatcctgtgtgctgttcgtacagtaaatgctcagatcaccttgctgtattctccggaaacccaacccacccgcgcattgaccactacggcgtgccagccgttgctggcggtggccacatagtccagcgtcgtgcccggcgcgagctgggtgacgcgcccgtactgcgtgccgttgcccacgcgaatgttgaccttgccgccatccgatacgatgaccacgtgggtaccgacgggcttttctccttcgttttcttcttcgccatcctccggctgcgcgggctgctccggcgtgtcctcgtcctctgcctctatggcgtccatgagcgcggcgtggctcttttcgccatacttgccgtccacctcgagcctctcatcctcctggaaggcccgcactgctgcttcggtctccgcgccaaagtcgccgtccgctccgtacttcggcaggctgtagcccagccgcaaaagatattcctgcagctgtttcacatcattgccttccgtgcctttcctgagcagccgggagcccagcgcatactccgtctgcggcggtttcacactgccgccctcgccgtaatcaatgaacggcaggtagtaccagtgcgtccacttgcgatccttcacccgcgtcttgacacagccataattgaagccgcgctcctccacggcgtagccgccgcccacataaacgcccacatgcccgtccgagcgcagtgcgatgccgggaacctccggcaggctgtccatcgtgccccaggcgcagcctttgcctttggcatagctgaacatgctgttggccgacttatccgggcagttgttggcgccgtacttgctcgagaaggtcttgtccgtgccgatactctcgactacgcccttgccgccgcccgtccagcagtaccctttgatcaggccgacgcaatccgcgcagaccttctttttcgcaatgtcgtccctgtaccggctggtacggctggagccgtaatgcgacggatactgcctcgccttgcgagagcgcaggttttcggtgcatttatacacaaccgttccgtaccagtaaggctggccgagcatggagaggcagaaggcgacaaagtgctcgttggtgaacggggtgttgattcgatcagacatataggttcctccattctctggtcccatgaaaaaagggcggcggtcgcccgtcgccctgcggtgaatacggtttgtatcagtcctgtttgggagaggtgtacgtcaacgcctgcttgctgtccgacagacccgccgtggtgggatcggcgatcacgcccagcatgcccaggatggtgaggatgccctcagccacctgcatgaccgcgctctgcgtcacggcgggcgcgatctccagcagctgcagcagatcatagatgaagaccaccaccagagagatcaggccggtcagaaaggtcttgttctgaaagcggattttccagttgatgttcatacttcgttcctccttgatgtattgattgcagcgcgggattcccgcgattgctccgaaggtacttcgccgcccttcttgtagggcagctccatggcctgcctgaccatgtcggtcacgatcccatccccgcccaggctgtgataggcatcgtacatgctggtgatgttttcccgggcgtacaccggcgcgaagcctttctcaaagtaatggtcgcaggcgctgatgatccggtcgcgcagcagcgcgcgcatcccgtcgtccagcgcctgatccttcttctgcgtatgccgcatgtgcctgctgacccgccggtagctcgccgcggccagcgccgccacgatgccgaacagccactccacccaatatcgcgtgatccattcaggcatgctcttctccctccccgatttcaactttgtcaatggccgtcaactggcgaatcacgtctccgcctccgtcacaggtggatcttcctgaccgccttcgctcgctggtgcccagagggccgatattgccggcggctcccaaccttcctgcgaggtgtgcgcctgaaggcagatgtacagctcgccctccgcgtccgggtacgcgacttcgtcgcccacaatgtagtcgattccggcggcccagacgcgcacttcatcttcggcgatgatctccaccctgtgccagagtgccggggtcaggtcgggcgcccagtcgtcctgcgtggtgtgcggctggatgcagcgccagagcgcgcctttgtaggtgaacacgtcgcccacctgcacggcgatgcccgcgcgccagatgcgtccctccagaacaggctgaacggagagcagttccgcatccgagatgcgtccatccgccaccgcctgcctgagcagcaggcccagcacattgggcagcgcctcgtccgcgcttactgtgatgaaagattccaccggcagcgcctgcatgagcagctcgtccgtcacttcctgaccctcgctcacctcaacgctgtccggcagcaggatcacctgctccgccgtgacgcccgacatctggaatgactcgcccgtcaggctgtaatgtgtggcatccgtccgttttgccgcaagaaaagaggagcggatgagcgttctcacccgcccctcgaaggggatcgcgatgtacatctgttaacctccttagccgacggccgagccgccgctgttgtaaaccacctgcagatagggcttgtggctgctgtctgtgccggccatgcgcatgtagttgttcgaccagttggatgagccgaaattgtattttgattcgtataggcacagaccgccatacgtcccgttggccagtccctgaaccgccgcaagcggaatggcgaacgtcgcctgctgcgcgcggccaatggtcccgatggccccgtagtttaccgcgatggaaggcgcgccgctggccgtggtgttggtgatggcgcacaggtagagcgttttggcagagctggagccgctgcccgtcttgcggtacagcgtaagggtcgccgacttgatcgtcgtaccggagagcacgctgcgcaggttgccaaaccacatgcagccgtaattccagttcaggctggacttgtagccgctgtcggagtagaccccctggatcacgtccacggtatccgagcgccagccgccgcgataggacttcgtgagggtggcgtactggatggtcgtgctgtccgggacgaccacaggaatggccgtgccgtagtccaccgtaacgccgcttgcgaaaagctggccgttctctccggtcccccggctgccgttgggtacggtgccgctggcgatgatcacactcgcgtaggaaatcatggcccagctgcaggagcccttgcagtccttcacgttcgcggtcgccaggtacgcctccacaccctgcagcgcgttatacagcccggtattgtacagaaacacatggctggcgcgtgcgtagaccgagtcataggtgacgttgtttgcgtccagtgtacagccattcaactccacaaaatgacacagcaagcattccaccagatacgggttccggctgctgccgttgagcggacggctttcccgcagggagacattctggaagcacacatgcgctgagcatcccttcacccggatatagctgttgagacggcacgcgctgtacccgtagatcatcagcctgcccgggccgctgatcccttcgatctgcgtaccctgcggttcatagatgtcccctgaactgctggggaggtagatgacgacgtcacgacggaggaaacgattgttgattcctttcaccgcttcgcccagcgagcggaaataggtgtcgctggttccgctgtaggacgcgttgacgtagagcgcgctcggcccggcgtatgcctgcgccacggaatcggagatgatctcgtctgcgtacagctccttgaagcctacgttgccgtccgcgctcatctccatgaggacgttttcgttgttggcagggtcgagcaactggagcagaaagttttccgtggtgatggcgacgttgtttgagccaatggaaatcccgcttgtcttgagctcctgcgcgcccacggccacccaggctgaacccgtgtaccgcttgaggatgggcggagagagggacgtgtccagccagagcatgttggtgtagagggtagtaggagcggtgttgctgcgatacaccttttcggtgttgtagagcgaggtgctgaccttgagggcgatgctgttggcgttctgcgtgattcgggattccgcgctggtcatacgcccggcaaggccatagatgtcctcgggcgcggcgctccagtccgtccagacgtccagcacctcaagcttgacgttgcgataccgcagcgtgccggtcacgccgttggcagagcttgttcccagggcgaagtacgcgattgcgacagggctgtacgaagtcagattcagcggcccataccgcaagcgcacccagtcgtcgtcagttgtctggaaattggtatccgtaacgcgcagataccagccgcgcccggttgtgtacaaagtcgtgccgtcgtccccgccgtagtagcggtagtacacccagaacccgccgtacacattctccgtggaagaggcggatgcgtcgatgtccgtgcgcttgatgtccagtgagatgcgtatggccgcgccgttgccgctgtgggcaaagagatcgtccgacacagccagcgtcttttgcgtgtacacggtcatgctcccgtccggattctgataccggttgcccacaaaggtatattcgttgccgctgtccagacagtaatttcgcccttcgtatttttcaaaggcgtagagcgcggacgccgccaccgtcgccgtgatggcctgcggggtgattttctgctcggcggactgcacgcgcgtggagagggaatcgacctccgtctggtccgccttgagcgcgatggccgcgtcggtctgttcaaagcgggtggacatctcctggcgcgtttctcccaccgccacgctggcatcatagcccacctgcgataacggcttgaacgcgccgtccacaaagcgatagagcgggtgttcggggaacacgcaggtctggtaggttccggtgagcgtacccagcgccatgtaagtcatcccgtcgtcctcagtgggaaccgtggctgttatgcatgtttccgccggcgtaaagaccgtgccggccagcgtgcccaccacatagcaggttgtgccgatggttcccgcgaagtccgggtcaatggagcgcagcgtacagaaggggtaggtcaggtagaaattggcgctgtacatcccggcggacacggcggtggcgcagtagagcaccggccgggtcacgtcaaagggtacgccagccgccaacggaaagcagccgtccgcgtccgcgaccgccagtcttcccgcggcaatggctgtctttgccttgagcgtggtaccgacgcggatgcggtcgtaggtgtctgtgttgtagttggcgtccgcccaccagcctttggcgatggtcgtggaatagatggtcacgttttcgcggtaggtcagacgcacgatgttgcccgccccgtactgcgtgcccagccggacgctgccgccatagtagcaggggatcgcctcggtggtgctgccgtccgcaagcgtcagcgccagcgtgacgttgctcccggacgcggcgggcagccagtaggcgatctgctgtccgtcgtgtagctcctggaagccggcgttccctgtccacgccgcggtgtacgttgtctgtgtacccaccacaaactccgcgccgccagtcgcggcaatcgcggcgagatcctccctgtactggtcgcttcctgtcacagtggacacaatcgcgtcttccgtgagcttcagctccgccgcgtcgacccgttcacccaacgcgtccagatcctcctgatccgccttgccagagaccatgagccgcaggtattcgttgcctgtgatgtccatggcgttgagggctgcaatggtcgcctcgcgggcgaagagcgcgtccacgtcgaggttggccgcgatgaggcttcggatgacagcattgtcggcaaagatgtcctgcgcgttgagcgtcccggcggtgatggtgccctcgatgatcttctccccgccgttgatgctctggtcagtcacgtcgtcgttgacgatctgtttgagcgtcgtgaccacctgtccatcctcattcacggacaccgagtaaaaatgaccgtccgtgcctttgaccaccagctcaccgaccgtcagggagaccatgttcgcctcggtcacggccagtcgcgcgatgtagagttcgcccgccgtgccctgcgtgatgatggcggtgtccgttgccagatccttgatgtgcgaccagtcgatgtcggcggtctgcatctgggcattgacaatctctgcagtggccgccgtgagggtggtgatggccgcccagtcgatgttcgcctcgtcaatggtagcggcggtgatctgcgccttactgatctgcgcgatgttggcgctgagcgcctcaatgtcagcccattggatgtcggcgctgacaatgttggccgtggtcagctgcgccgtggcgatcatggccacggaggcgtagaggtcgtcggtggtgatgctgcccgcggccagctccttgatcttggccgtcacggcggtcagggcattgacattgagcgtatcaatgagcgcctcggcgatatgggcgcgggtgatgcaggcgtcctggatgtgcgcgctgccgatggccgcgtttcggatttgcagactgcccaccgaaccgctttgcagctgtccgctgcccacggagttgagcgccagcttcatgccggtgatggagccgctggccagctgccgggcggagatcatgctgccttccagcgtatccgcggcggttcccagcgtcacggaggtgtatttgcgcgtcaggcagtcgtaggtgtactgcgtcatgcgcatggagacttccacgccgatgcgccgggccaccacgcgcacgctgtcgccgaggaagatgttcagaagaaacgcgtactgccggtattcctcggtatcggcgcagttgacgaagtccaccttgagcgtcaccgtgggcaggtcgcaacccttgtcaaactccgcctgcgccgccgcgcgcatgtcctcatagcaggcggtcagggacttgtagttctcgccttccgccacctctttcgcttccgacaccgcaaggtgtatccacttgggatgcgtgtacgcgccgaggttcgggctgtcgatgtacagctcgggcaggtagaggatattgccatccgcgtcctcaccggtgggcatgatgcgggtgaccacgtcggtctcatccacgtcgtaggagatgccggtcaggttcttgcgctcccggatctgcacgtcgctgtccacgcccacacgccggaccagaaacacgtcgaaccagtcacgcgccagctccgcgccgtacttttccaccagcccgccttcgcccagcaacgcttccaccgggttgacattctcccattccgcttcctccgccgtggaggtcaggtcggagtagaaagtgaagtcgtggctggtaagacaggcatccgaaaggctctgtacgacggaagcccccaccgcggaggatgagggcttcagggacttgatcatgttgtccagcagatcgtagaagatgtggcgggcatacacggtgaccttatcaagctccggcgccacgcggtagatgcggaagggctggtcacgcagctgccgggactcgatcacctgattctgaaagccgacatccacctgcacgctctgctgctccgtgcgcacatgggtcagatactcggaagacatatacccgtgccgcccatccgggcaggtgacctcgtaccacgaggatgtggtcttgtttaccacgatgacctcagtgcccttcttgtacttgccgaggattctgtaccttgtccccgtgcctgagcgcaggcgcagcgggtcgcgctgggtggttaccttatagatctccacgtcgtaggtttgcgtctggtactgctgtgttaccagattcatctgcggcgtcatggcagcgggcaccggcgcgcgcaggatgttgccttcgctcagccgtgtccacctgccgtgttcgtcgatgggatggacgagcgtcagctcccactcgccgttcagcgtttcggtgaccgtgcaggactgcggctggacgatgcccagcccgttgctggagaagtccgtgcagtcagccgggtagatgcagatcatggggttcatcctcccttcgaggcataggaaaagcgccactcatcctgagtgacgccaccgtcaaccataacggaacagtcattggatacgaatagtcaccataccgtcgggcttgacggttaattccatcctccgaagataacggttaaagaaggcttccttttcccgaacagtcatctcgatccacgattcgtgcagacaagattccatgatatcctttacgttcataacttcccgcgcctttcccgtaaggatcgcattgatgcgctcctgcacggcgttaattagcgtctctgtctttaggagatacgaagctccggtgcagaaatcgtccaggaaacagtacgggatactctacacacttcatattactcggttccagtcaaataagcagtcagagaaagcgccaatttgggataacattcaaagaagtcacatttcccgtccagctcacggcgttctgccccggaagcagcacaggaaactccccactgatggcgccgttcatggaggtcgttcccgagtaggcttcctgcaactgcgagttcagcgttatgcttcccgatatgccctccagctccgtaatgatcatgcccaccatgagggtgatcgcgcccgtgccgtagaccgtgatgaccggttccgcatagacattccccggattggtgacaaacgagccgctctgggtcagggcaatgtgcgcgacattcttctggtaccaaaaaggcttgcagcggaagttgaccgcaaaggagcgatgcggattccctcgcagaatcttctcaaagggaatctggttggtgatgcgcgcctcgtaatacccctccggccggttggcaaaggtcactttcccgctgcccttgaggtaagcggcgatctcagcataccgctcggtattctccacgaagcactgcgcggtgagcaccagatcgtcgtagacggcgtcgccctccagcaccgtgaggcttccgctgcggcccggcacatccacaaacgtcgcccgctcattgggcagcgtcagcggcggctgttccagcacatggatgccgtattctgtgcagcgcacgtcgttccactcaaaccaatccttcacggttatccctccgtcctgcggcgcctctatggaaaaaccgcccgaaggcagcttctgtcataattctcccacttcgatcagatgtggcaatccacaatggtaatcgccagtccgttttcacgtgcttcctgcaggtatgcctggaattctttttcatattggttcatgctctcgttggtggcatcgtcgaagccaaaccagcccatgcgcccctgctcatgccacgcgccatctgccgtgacaaaggcgtatgtactgaaggctgtctctctgcggatgtaggtttccttgtccccgtagcgttgcagataatactccggcttccatatgctgatgaagtcttcgccttcgcgctgtgcagcgccctcgaccagaacctcccattcccgctggagtctggcgacacggctcgtatccggagagaaatcgcagtcggcaaccctcgccccgtcgcagcgatccgcagggtagtcaaaacccttgctccaccggtcgaccggcgcgcgatatccgctctttcccggcagcagcctgagcagtccgcgccacctcccgccgatctcccaccagtcccaccgggcgttgggattgtgccaatagccaccggctcccacagtcttgtcaagatcgcactcctcattttcgacaaactccgcatacggagaatccggatctacctgctcctcaaacggagccagcagcgcctcgacgtatccgggcattttggaaaataccgcaaccgaaaaatgtgacataccatagcctcctctgtcttcagggtagcgtatctatcactccacgccgcgtgaaagtcaagtcaattcttcgcgtttgagggatatttacgccatccgcattccctttccgcgctgttgcctgcgcgtgagcgcggcgatctcctccgccagcgcgcgcacgtcctgctcgtcgcgcacaaccagctgctgtacctgaatggtggaactgacgctattgttgtaggtgcgccggttgtcgttgctggtggtgatgatactcccagcctgcgcctcgccggtcaggtagcgcgcggcgtttcggatgatctttgcctgcgccctgctctccttgatcacgccgcggccccagccgcgcatggtcatcacgcccacctcatcctcaaatacctgcgagggggatttgattttgagctcgctcttggccgcgctgaccgctgcccgggccgcggagcgcatcgcggagatcacgccgctgcgtcctgagttgatgccggcttttaatccggccatggcgttgacgccagcggagcgcagagtcgtggcgttcaggctggtgccaaccgcgctgcgtacagccgcgccgaccgacgcgcccgtggcgctcatgctgtaacccgtcatggccaacgccaatccggccatggccgccgtgccgcaggccgccagcgcgttttgcggcagggcaaggccgaccgccgccgtcagtgcggctgcgagcgtcgccgcgtccgtggtaaagtcgtatcccgccatgcctgtgcccacgcccgcagagacgttctgtcccacgggcttgacgcgctcggacggggattggatgcccagcgccagattcagcgcggcttccaggttggccgcgaccgtctccgcgtcgctgtcccagcccgccgccgtcatgccttcgcccacgccttccaggatgtgcgtgccgacttcgctggtatccagctcctgcaggaacgtcaggatcatctgcaggttgtccagatcctcctgcttcaccgcctgaccctgctgaatggccgcgacgatctccgccacataggtggacagctccgctacgcgctcggcagggaagtcgatcttcatgctggtatccagcgtgcccttgttggtggacgcgccgaacacgctggcccagaatttatcccaggcgttgtaatccagcgtctcctgatacgattgcaggcgggagagcgcggactcgatcaggtctaggctcgtctcgggcagaagccctgccgcctggcccagtgccgtcacgcccagctgatcgacctcggccacctccgtgcgcaggctgtcaatggcctcctgtgcgccggtcacgtccggggcgatgagcacatgcagcgtgccgtcctcgtcaagcaccgccaccttgtcggcggtgagcatctcggtgggcacggcctgcacgggaatctcctgcccatcctgccagaacttcgtttgcgggtcgagcagcgcgtcggcggggttttgaaagacctcgcccagcttcacaatgccctgcacctccaccgggttttcctcgatga

SEQ ID NO: 4524 - DNA, 6421 bp, Unknown
  16S sequences of unknown bacteria
cagctggccaactatgtcgctaccctggccggcggcggagaacgttacaccccccacctgctcaaatccgtccgcagctacgacaattccgagctggtctattcttcttctgaaatggaacccgtggaaaccattgacatcgattccaaaaatctggaagccgtactcaaaggcatgctgggttatacccagcccggcggacaagtctattcttatttcaaagactgcgtcgtcactgccggcgccaaaaccggtacagcccagctgggcggaaaaaaagaaaataacggtgtgtttgtcgcctttgctccttatgacgatccggagattgccgttgccctggtgatcgaaaagggcggcagcggcgcggctctggctgaaaccgctgtggggatcctgaacgcctatttcagtaaggacgaaattgctaccaccatcatcggtgaaaacgagctgctgcgctgacgttcataccgcccccaaggcttccctgccgccaggctgaaaaggacaaatgccccggcagggcgttcagagccatatgttcattacgctccatttttatgcaaaaggaggttttcatgctcgacgccttgatctatcatccccgtcggaagcactgcaagaacccattcggcgcagtgcctctgggcacacaggtgcgtttttccgcagggctgccggcggcggccgtaggctgtacgctttgcgcaacggcggaattttccggcgccaaaacagaaatagatttgccgttcgacgctcagggccgctgcagcggcatttacaccgctccggcagagccggatttggtgtggtatttcctgcgctttcgctttgctgatgggagcacccaagattacggcgcggagggatttgtcccggcaggcagcgccgtgcctccctttcagctgactgtatacgatgccgccgcgcctacaccggactggtttggacgcggcgtaacttatcagatcttcccggaccgtttctgccgcctggagccaccggagccgaagggtatgattggaaaccgctgggtgcatgaaaactggaacgaaccgatggcgtaccagccggaagacggcgtgatcaccaaccgggattttttcggcggcagtttaaagggcatcttgtcccggctggactatctggaaagtctttcggtatccacagtgtatctcaaccccatttttgaagccgcctccaaccaccgttacgacacctgtgattattgcaaaatcgacccgatgctgggcacggaacaggacttccgcctgctgtgcagcgaagcggccaagcggggcatacgggtaattttggacggcgtgtttaaccacacgggaaatgggagccgctattttaacgcctgcggctggtatgactccctgggcgcagcccaaagcaaggattccccctggtatgaatggtacgatttcacccattggccggatcaatattcctcctggtggggcatcgacacgctgccccaggtgcgggagagcgttccctcttatatggatttcatcatccaaagcgcggattccgtcgtgcgccgctggctgcgcgccggagcctccggctggcggctggacgtggccgacgaactgcctgacacatttatcgaggcactgcgcaatgccgccgtggaagaaaagagcgatgcgatagtgatcggcgaagtgtgggaggacggctccaacaaaatcgcctatggccagcgccgcagatacctgctgggtcatgagacccacgggctgatgaactatcctttccgggtgtccgccatagcctggctgcaaggcggcgacgccgccgcctttatggaaaccatggagacaatccgggagcactatccccccgccgctttctattcttccctgaacagtctcggcacccacgacaatccccgtatcctgaccctgctgggccagagcgaagacctgagccgccacgaccgggactggcgcgcccattaccggctgagtcatgccgagcggcagcgggccgtgcgccggctgaaactggcttccaccctgctgtatgcctttcccggctcccccaccgtgttttacggcgacgaggccggcctggaaggctgcgaggatccctttaaccgcggcacgtttccctggggccgtgaagacgcagtgctcctgcatcactatcgcaccctgggaagactccgcagcacgcggctgtccctgcagaagggcgccatcgaatacctgcgcgccgaaggcgggctgctggtattccttcgtcgctgggagaacgaggtgaccctggctgccctgaacaacggccctgctgcacaggcactggaactgccctggagcggcgccatggccatagacgctctgagccggcagcaatttgcagtccatgacggcgtcttgaaaattaccctccccccggaggacggagtactgctgattgaatgctgaacagcaggagatgtttcacgtgaaacatctcctgctgtttcccttttataaagcaaagcggcgcctgccccagagcgacattcgctccctgtccctcttattgcattctttctctgtgctgtcgtatctttgtcaaaatctttattccagggggcgctccgtatcaaaacgaagctttgctgcatgcgctgtgcagccacattttctgaaaaacgatacctatccaaaattcatccgcaggtaaaactggcctgcggaaggatctgacggcagtatgctcctcattttggagggcgtgcccggtgcaagctgtatccatagatattccgccgccgccctgcccgcccctccggtaatctcacggttttttccagcggcggcatccctcctaccggggattcgatgacaccggacagccccccttctggatgacgggctttcgtattctcgatatcggattcctatccaccttttttccaggcgccgactgcgcctggaagttttcttctcctgccgcctttcttgtcctctgcacaaaatttcccggttgtttcacgtgaaacaatgaaacaattttctcttttttcttgttatgccccgttaatgatgatataatggcattcaatgggctatgctactattgaaacagaaagggccggtgcggaatggcaaaaattgtggcagtggtgaatcaaaagggcggcgtgggcaaaaccaccacctgcgtgtccctgacggcggcattgcaggaaaaaggaaaatccgtcctgctgtgtgatttcgacccccaggccaactccacttccggcatgggggtggacaagacgctgtccggcggcgtatacgacgtgctgatcaacggcgctgacgtggaaaaaaccgtcgttcataccaaatggggcgacgtactgccctcctccaaaaatttggcgggtgccggcattgaaatgatcggcctggagcgccgggagtttttgctgaaagacgctttggacgagctgtcgccccggtacgatttcattctcatcgactgccctccctccctggagctgctgacgctgaacggcctttgcgccgcggacaccatcctggtgcctgtgcagggcgaatactacgccctggaagggctgagcgatctgctgaacacagtgcgcattgtcaagcgctctcttaatccccgcattgagctggagggcgtgctgctgaccatgttcgacggacgcaccaatctggccaaccaggtggcggaagaggtcaagcgctattttcccggcaaggtgtacgccacggtgattccccgcacggtgcgcctgtccgaggcgcccagcttcggaaagcccatcaccgcttacgatcatagctgccgcggcagcgaggcttaccttgcgctggccgatgaatttctgcaaataaacggcgcgcaagcccgatcctgagccttctctgttcatttgaccgcatggaaaggagcgtttctatggcaaggaccatgcaaaaaggcctgggcaaaggcctgggcgccctcctgggcgacacttcccccctctcctccgcctccgccgccgaaggcagcggcgttactatgctgcccatcgccaaggtggaggcctaccgcaaacagcctcgcaaacaatttgacgaagcatccctgcaggatctggcggattccatccgccggcacggcattctgcagcctctgacagtgcgcaaactgtcctcgggttattatcagatcatcgccggcgaacgccgctggagagccgcccggatggccggcctcagcgaggtgccggtgctcatcatcgaagccgacgaccgcaaggccatggagctggccatgattgaaaacctgcagcgcgaggatctcaatcccattgaagaagcagaaggatacaaagccctgatggaggactacggcctgactcaggaggaagcggccgagcgggtgggcaaaagccgctccaacgtggccaacgtcctgcggctgctgaacctgtccgccccggtgcgcgcactgctggccaaaggcgtcctgtccgccggacacgcccgggcgctgcttcccctgaaagccgcagcccaggaaaaagccgccaaagcggtagcagagggcggcctcagcgtgcgccagaccgaagcgctggcaaaaaaactgctcagtgagacggataaaagcccatcgtccaaagcggccaaggccggcgtggactataccgccgaagccgaaaaagagctttcctcccgtctctcccggggctgccgcatcgttaccggccggaaaaaaggcaaaatcgagctggaatattacggtctggacgacctgaatgatttgatcgacgcgctgcgggtcctggaaatccacaagcacagaacctgagcggaaaggacggaacaacaaaaccatgaaacttgaaaaacgcgcgcagtccgcttcggaggaaaccgccgcgcaaatccccgccgcactggcggtggaaaacggcaggcataaacccgtactgctgtatctggtgatcctgttcgccatcgccttcgtgctgattctcttttctttcatcatgcaccagcgcagcaacgctgaggtgctcaaagaactgcagtcccaggtggagaccttgcaggagctgcagcaggtggaggagcagtacaaaaccgtcagcgaggaaaacaaagccctgcacgagcaggtagacgctcttaccaaacaggccgagacagacgcacggacccacagcgccctgctgctggtatggaaactggaacggttatacgccgccggcgacaacgagggctgtctcgccgccatcgaagcgctgcagcaggacgatctttaccttgcgctgcccaatgaaacggatgagggtgaaatgtacgaaacgccccgcgccgcatacgaccgtattctggaagccctgagcaatacggccggctgagaaaaaccaaaaaacatttttcgaggtgtaacaatatgctggatatgaaatttgtccgcgaaaatccggacgtggtcaaagaaaacatcaaaaagaaatttcaggaattcaaacttcctctggtagacgaagtaattgctctggacgcagaaaaccgcgccgccattaccgaagccagcgagctgcgcgcccagcgcaaccagctgtccaagcaggtgggtatgctgatgggacaggcgaaaaaggacccctccaaactggaagaggccgaagctgccaaagcccaggtaaaggccaacgccgaccgtctggccgagctggagcagaaagaggcggaattggagcagaagatccacaaaatcatgctgcagattccccagatcatcgaccccagcgttcccatcggcccggatgacagcgccaatgtggaagtgcagcgttttggcgaagccgctgtacccgcgtttgaaattccctatcacactcaaatcatggaatctttccatggtattgatttggatgccgcaggccgcgtatcgggcaacggtttctattatctgttgggcgacattgcccggctgcatgaggccgtgttggcctatggccgcgacttcatgatcgacaaaggcttcacctactgcatccctcccttcatgatccacggcaatgtggtggagggcgtcatgagccagaccgatatggacgccatgatgtacaaaatcgagggagaagatctgtatctgatcggtacgtccgagcactccatgatcggccgtttcattgaccagattctgcctgagtcctccctgccccagactctgacctcctacagcccctgcttccgcaaggaaaagggcgcccacggcatcgaggaacgaggcgtgtaccgcattcaccagttcgaaaagcaggaaatgatcgtggtctgcaaacctgaggactccatgaactggtatgaaaaactgtggcgctacagcgtggagttgttccgctctctggacatccccgtgcgccagctggaatgctgctccggcgatctgg

SEQ ID NO: 4525 - DNA, 4988 bp, Unknown
  16S sequences of unknown bacteria
agacagcacgtgaagaaatcgtatcgtaaactgattatccgggaggtaacccattccctctcccggtttttggctattttcggcatcgttgcactgggggtcggctttttggccggtctgctggccaccaccccggatatgcgggtgtccgtcgaccggtattacgacgagacccggatgttcgacatccgggtggtctcaactctcggcctgaccgaggcggatgccgccgccatccggaataccggcggggtaaagggcgtaatgccctcccgcaccgccgacgccctggtgcggatcccacagggggacgacctggtcgcccgcatccagtccctccccctcgccctgcttcaggaggattcccccggctatcagaaccgggtctcccttctcgaggggcggatgcccgccgggccgggggaatgcgtgctcgacgtttccaaaatcgccgaccagggggtcgaggtcggggatgtcctcaccctgtcccccgacaacgccgatttatcggataccctggccttgtcggccttcaccgtcgtgggcaaggtcgagagcgcgacgtacttttccatcgaaagggaaccgagcacggtcgggaacggtacggtctccctgattttttataccggggacgacgccttttccctcgatgtgtacaccgatttgtatattctggtagatggggcggatgcccaaaccgcctttaccgacgggtatgaggatgcggtccgcccggtcatggacactctggaaacgctcggcatcgagcgctccgccatccgtttgggcgaggtcaaagaggaggcgcaacgggagctcgacgatgcccggaccgcgtacgaggacaaaaaggccgaggcggaagccgaactggcggacgctcagaggcagctcgacgatgccagggcggagattgccgacgccgaacgggagctcgcagaaaaccgccgggcccttgaagaaggcgaagcacagctggaggacggccggcgcgactatgcgcaggggctcgatgagtataacgaagggctggcgtcctggcaggacggcgtccgcgggctagaggcgcagcgcacggagtaccaagcggccatggcgggcaatgaacaggagctcgaagacgggaaagccgcccttgccgcggcccgcgaagcgctggcggatacaaaacggacgctcgacgagagccgcgcgacgctggacgcggcgcggcagcggatcgaggagtctctcgccgcgggtctgctctcgccggagcaggccgaaacggagctcgccaagctggcgcctcaggaagaggcatacgcgcagggggttgccggctatgaagccggggtcaagctcgcggacaggcaggagcgggagcttctggaggctgaaaaggccctcgccgccggcaagcaggccgcgctggcggaatttgccgccgcacaggcgcagttggatagtgttaaaaccgaactggacagcgcgaaagccgcttttgacaaggccgcccgggacattgccgagagcgaggttaggcttgcagacggccgccggcagctggaggacggcgaagccgcgctcgaggaggcgagggcgcagctcgagcagggggaagccgactacgaacaggggcggagggacgccgacgagcagcttgaggatgccaaacggcagctcgacgacgcacagcgcgacatcgacggcctcggcgagccggagtggatggtcctggaccgttcttccaacgccggatacgtcagtttcgaaggcaatgcggaaaaagtcgccgccatcgctcaggttttccccattttctttttcttggtcgcggcgctggtcgccctgaccaccatgacccgtatggtcgaagaggaacgcacccagatcggcaccttgaaagccctcggctacagccgcggtgcaatcatggtcaaatatctgctctacgccggagctgccacggtctgcggctgtgtgttcggcctgctggtcgggttccgggtcttccccaccgtcatctggggcgcctacgaaatcatgtacgaccttcccccgctcgtagcctccttcaatgtgaaatacgcggccttgtcgtcgtcggccgcgattctatgcaccatgctcgccaccctgtcggcctgcgccggcaccctgcgggaaaatccggcccgcctgatgcttccgaaggcccccaaggcgggcaagcgggttttcctggagcggatccccctgatctggaaccatctcaccttcacccacaaggtgacagcgcgcaacctcatacggtataaaaagcgctttttcatgaccgtgatcggcatcgcgggatgcacggccctgctgctgaccggtttcggcctacgggattccatttcagacatcgttgacaagcaatttggggaaatcgcccattacaacctgatggccggcctcaagaccgaccgagatgacgacggcctggccgaaacgctcgcctcgtccgcgtcggagtccctgtatgtccagcagacgaacgtggacgcgaccggaagcggcggcaccctgtccgcctatctgtatgtgccggaagaggccgcgcgtctcggggatttcatcaccctgcgggagcgcaagagcggcaaagccgtacctttctcggaagacagcgtcctcctgaccgaaaagctggccgcgaagctcggcgtcggggccggggatcccctcaccctgcgggacggtgacggccggacggcccgggtgacggttggcggtatcacggaaaactatgtgtacaattatatatacatggcgccgtccctctaccgctcctccttcggcgccgagccggactataacctcgtcaccgccaaggtggcggacgagtcggacgccaaccaggacgcggtggccaccgcgctgttaggggtggacggcgtggcgtcggtgtccttcaccaccgatgtcagccgttccttcgccgatatcgtcaaaaatatcgattatatcgtcatcgtcctcattgtatcggcgggcctgctcgcctttgtggtgctgtacaacctgaccaacatcaacatcaccgagcggcagaaggagatcgccaccatcaaggtgctcggtttttatgaccgggaggtcaacgcctacatcttccgggaaaccggtatcctcagcatcatcggaaccggtgtggggctgatcctcgggatcttcctacacgcgttcgtggtccgcaccgccgaggtggagatcgtgatgttcggccgggacatctacgccatgagcttccttctcgccgcggcgctcaccctggccttctcggccttggtggatgtggtgatggcccgcaagctgcgccggatcgacatggtcgaatccatgaaggcgggagaatgagctacaaggtccgggcaggtttatcgcggcagaacaaggatatttcgagccttatatatgagaaatgagagagaggggattgaacctgaccggcacttgattgacgtactataacgtgttataacaaaagcggaattggaggtgaagtaaaatgtatagacatagacgcatcctcttcaaacgcaactccatacagaaccgttcgtttggttaatggcatttgtatggagtaaattacgccattaacaaccttactggttctgtatttacggaaaaaatataaatacaggagtcagtaaaaatgacaaaaaacattgcgcggtatttcgatgaaagaattatgcctttgatccgcagccgacaccgtgatatcgtatcggaagcaagtatcatgatccttggctctgtgggcttgcatattgatgatgcgttttctgacatggaggcggtgctctatcttcctgatcccatctggaagcaaaatggggtgctgcaaatagagctggaagaggttctgaaagagaccaacccttggaaacaagagggtatggtcaacggctcgatcatcagcgtgcaccctttatcgtggatgcttgaatatcagggggagaaaattcttgccagcggctgtgtcaattgggggaaattgtcgtttgaagctctgtttaccatacaggaaaacgtgatttattacgacccggaggacaggctcggtcgtcttcgccgactgacggcagccgagaagatgccggatatcttttggaaaaaggctatctataacaaattgaaggactttgtagagaatggtgtccgggccatacagatcagtgtgaatcgccatctgttttcgactgccaatatccaattcgggcacaccgttcaaaccttatatgaactgggatttttgatttgccatcagtactatccttatcttaagcatttgcgatgggctttcggcaggttgcccgaaccgatttcggagttaaacgcctattttgatatgctttcagccacttcggattggtgtaaaagactgacgatgctggaaaccatatacgaggcatataagacatttgtcgtttcgaaatccatttttccggaaatggatttcgatcgtattgatttgcacgatatgcgcatacatacggatttgggtcatgccggttggtttaaagcttgggaaaatccggattggcggggaagcctgaatgcccttaaggaaaagacggtgcaactaggctatgccccggatatgtggtggatcgttgattggtataacttaggttaaccggataaacccccgcctcctattcacagtggcctttctgtttacgctctataccggctccattgggggccggtattcttttgaaacgggtagtggatggcctattctcagatagatcatccttcctgacgattccgaccggtgtctatagattataaccgccataatccccccggggccgcagcccctattttataaacgctggttgaggtgctcgcgttgccgccgattttcatgaaaagaaaatcggccggcaatctgggggccgggggaactccccgggagcatttttgcccacttttgcggctacgagctgaagctcgggcaaaag

SEQ ID NO: 4526 - DNA, 5892 bp, Unknown
  16S sequences of unknown bacteria
ggactttgaaaacaagtccggggcggctttcacaatccggatttacgcggaatttaccgagaaaaatcaaggaattccgcgaaaatgttcaatttattatggtttttggggggtaaaatcggaataaacagagaaattcgcgattttcacgggtttttttgaaaaactattgatttttgcgcttgattctgctacaataatgtcattgcgggattttctttatcagaattaccggattattatttttgaagcgggggcacgatagttttaatggacaaacacaagataatcgagcttaagggcataaccaaggaatacgagggtgagcccgtactgcgaggtatagacctcaacattcatgataaggagtttgtgacgctgctggggccttccggctgcggcaagacgacgacactgagaattgtcggcggcttcataactccggattccggcgacgttcttttcgacggcaagaaggtcaacgatctgccgccgtacaagcgtccggtcaatacggtgttccagaagtacgcgctttttccgcacctcaacgtgtatgagaatgtcgcgttcggtctgagactcaagcacactcccgaggcggaggtgtcaaggcgtgtcggtgagatgctcgagatggtcgacctcaagggctttgacaagcgcggagtgaaccagctctcaggcggtcagcagcagagaatcgcgatcgcgcgcgctctgatcaacgacccgaaggtgctccttctcgacgagccgctcggcgcgctcgacctgaagctgcgcaaggaaatgcagatagagctcaagaaaatacagcagcagatggagataaccttcatctatgtcacgcacgaccaggaagaggcgctgacaatgtccgacaccgtcgtcgtcatgaaggacggcacgatacagcagatcggaactccgcaggatatctacaacgagccgaagaacgcgttcgtcgcggatttcatcggcgagtcgaacatcctgccgggcatcatgcacaaggacttcctcgtcgagttcgcggggaacaacttcgagtgcgtcgacaagggcttcgctcccatggagccggtcgacgtcgtcatccgtcctgaggatatacagctcgttccggcgtcggacgaggtgctcaacggcgtcgtcgagaacgtgcagttcaagggcgtgcactatgagatcatcgtcagggcgtactcggacacatggatcgtccactcgacgaaggcgccggaggtcggctcgatcgtcggcataaccctcacgccggaggatatccatatcatgaagaagagcaacgtaaagaaaatagattatctgaagtcggaatcggaggcggagaaagacattgaacacaagatctaagctcgccgccgcgccatatctcttatggatggtggtattcatcgttgtgccgctcatcctgatcgcggtgttcgctttcacgacgacggcgacctgtgacgccgaggggaacatactctctgaggaagcgctcgccgattatctcgccgagtgcgaggagaacgagactgagccggagctgaccgagaagacgatattcacattgcagaatatcctcgacgtctcgaagtacacgacggtgctgataaactccgcgtggctcgctcttatcgcgacggtcatctgtcttgtcatcgcgtatccgctcgcttatatgatctcgagaatgttctacactcggcagaagctggcgctcatgcttgtcatgctcccgatgtggatgaacttcctgctccgcacctacgcgtggatgacccttctcgagaagaacggactgatcaacaagctgttcggactgatcgggcttggtccgttcaatatgatcaacacgcagggcgcggtcgtgctcggtatgatatataactatctgccgttcatgatcctcccgctctactcggtcatgacgaagatcgacaacagaacggtcgaggcggctcaggatctcggggctaacagcttccaggtcatttcccgcgttatcgtgccgctctcgatgccgggcgtcgcttcgggcatcacgatggtcttcgtgccgtcagtttcgacgttcatcatctcgagaatgctcggaggcggaacgaatatgctcatcggcgacctcatcgacctccagttcctcggcaacgcgtataacccgaacctcggcgcggcgatctcgcttgtgctgatggtgttcatattcctgtgcatgtcgatcacgaaccagctcgacaatgaagaaatggatggtgttctgctgtgaaaaagatcacttctaaaatctatatcgcgctcgtgttcattttcctctacgcgccgatcttcgtgctcatcgcgaactcgttcaacaagtcgaagagccgcacggtctggaccggcttcactctcgactggtaccgcaagctgttcaataacgacgtcattctgaagagtcttctgaacaccctcatcgtcgcggcgatagcgtcgataatctcgacaatcctcggcacggcggcggctatcggcatttacaacatgaagaagatcacccgctcgctcgtcataaatgtcacctatatcccgatcatgaactcggagatggtaacgggcgtgtcgctgatgcttctctttgtcgcgctccacatcgatctcggctacatgacgctcatcttcgcgcatataacgttctgcgtgccgtacgtcatactgaacgttctgccgaaattgcgacagatgaaccggaatctctatgacgcggcgctcgacctcgggtgcagcccgatgcaggcgttcagacacgtcgtcattccggagatcatgccgggcatcgtcaccggatttctgatgtcgataacctattcgatcgacgactttgtcataagctatttcacgcacggctcgacgtctcagacactgccgatcacgatttactcgatgacccgccgcaaggtctcgccggaggtcaacgcgctctccgctataatcttcgtcatagtcctcatggtgctgctcctcatgaacataaaggatctgaagagctccgcgccgggacgcgagaagaaagtaaagcacaaggaggcgggaaaatgaagaaaagattttccgcgcttctgttgaccgcccttatcggggcttcgatgctcatgccggtatccgccgacgagccggagtactcggacagtgtcgactggaacaaattccgcgggcagaacgtcactataaacgtctacaactggggcgagtacatctcggtcgacgacggaaccgagggcgcgtatgacacaaaccgcgagttcgaggagctgaccggaataaaggtcaactacacgaatttcgcgtcgaacgaggagctttacgcgaagctcaagaacggcggctcatcctatgacgtcataatcccttccgactacatgatcgcccgtatgatcaacgaggatatgctcgagaagctcgatttctcgaatatcccgaactacgggaatctgataatggacaagttcaaggggatggaatacgacccgaccgaggaatactcggtgccgtacacctggggaatggtcgggctcatatacaacaccacacttgttgatgaagaggacgacgtcggctcgtggtcgatactctggaacgagaagtacgcgaacgatatcctgatgttctcaaactcgcgcgacgcgttcgcgattgcctgcaagtatctcggctactcgatgaacacgaccgacgagaaggaactgaagagcgcggcgtcggctctgaccgaccagaagctgctcgtacaggcgtatgtcatggatgagatcttcgacaagatgaccggcggtgaggcggctctcgcgccgtattacgcgggcgacgcaatcacaatgatcggggacaatcccgacctcgcctactcggtcccgcgcgagggaacgaacctgttcgtcgacgccatgtgcattccgaagggcgcgaagaacaaggaagccgccgagatgtacatcaacttcatgtgcgagacgaagacagcgctgagaaatatcgagtatatcggctattcgacaccgcagaaggatgtcccgcagtatctcgatccggagcttgcggagagcccgatatcctatccgtccgacgaggtgctcgagaacacggaggcgttcatcgcgctgccaaacagcaccacaaagctgatcgaccagctctggacgtcgatactctccgcgaacgagacggcgccgtggacgattccggtgttccttatcgcgtgcctcgggctgtcgatatcgataaatgtcgtcagggcgagaaagaaaaagcacggtaactgaagaaaaatcttccccggcggattatccgccggggaagatttttctgagtgtatataacaagactgctgggggagaacctcattcactttactgattcagattaaggaagcgctgagtaattcgtgttttcgcggaaaaaggtttgaatttatgggctttttccgcgaaaacaaccttaaatcagtgtttcactgagcatatgcaaccggattgattgagggcgaatgccgttttgctctccattatttattcggcagataaacgaaatagtacagcccgacaaagagcgcggagagaacgaacagaaccgagaggagcaccgcgttttttttcgtgaacgtgaacttttcctgccctgcgggaatcagtccgagctttgtcagcggcaggatcatcgcggacagaaacaggatgagaaggaacgactcagcggggaagagcgccagattcttcacgactctcgggagagtgatgaacttgctcgacttaccgttgttcagtatcaggtagtaccagttgagaatcgcgggattcaggacgtagttgcaggcggcgacgacgaagaagcgcgagaggattatccgtgtgctcgtcagcttctgcctccagagcatcagcgcgaagatcagcgaccccgcgatctcgacgaacacgaacgggaagaaatacgctccgcccgacgggtcgacaaggactccgagcgtgtcggatatcaccgccccgatgaccgccatgacaggaccgaagatcatcgccccgagcgagttcacgaaaaaaccgaacgtgatgttgagatcctgtccgaccggtattttcgttcccttgagggcaattctgagcgcgataagcatggcggcgacgcagaggacgcggacgtctttcagctgaagcgccgcctcgcgccagtatccgccggtgaagacgtcgcgggttgtgaacattttcttttctttcgaagactgcataaaataacctccttgatatgcagcattccgacaggcagcatataaggaagttatccgttaaggaaattctccgggtatgcgacagcgggatgcgaccctgacaccgcagtaatccttaggattctttcgttccggcgacaactccccgtccgccggacacttcacgcgtcatggtctactctgtgcgatataatacgtcgtccgagcggttttccgtccggcgcgtattctgaatttatcgacatatatatgataccacttcccggcgctcttttcaagcgcaaaaacagacgaacttcgcccgcccgccgccggttttcagtacatccctgacaattccgaaaaaaaacaaaaaactttgctctaaccccttgacaaacgctttcgtttgtggtataatatttaagcactcgtgagtgagacacaaaaggtccgagtgaatatggcggagtagctcagctggctagagcaaccggttcatacccggtaggtcatgggttcaagtccaatctccgctaccattttccggccaacaggtcgggaattccggcccgttggtcaagcggttaagacacggccctttcacggctgtaacatgggttcgattcccgtacgggtca

SEQ ID NO: 4527 - DNA, 2673 bp, Unknown
  16S sequences of unknown bacteria
gaaattgtccgcacatcccccgtgggtatcgtgtcactttggcacgaagggacaccccgctttcaggttaatttaagctaacttatcggcttgaatgtgctggacctctgctatcattacagtactgaacgtagcaacatgattccggcagcgtacgtttagaggcgtgagaagaacgtcgtctaagcgtgcagtgcgcccgtatctcccagactgccttctcgcgtcttaagctatgcaagagaggcggtcccaatgccaagaacaatgcgaatccatagtgcgacggacgtgtaccatgtctgcaatcgaggcgtgcagaagcgccggatattcgatgacgacatcgaccggaaacgctttgtcacctatatgcgtcaatccctcgaagggctcgatggctgcatcctcgcctggtgtctcatgggcaatcactttcatcttgtcgtgcagatggagttcgaggagctcgcggctttcatgtcgcgtctgaccggtgcatatgcaacgtattacaacctgcggcacaatcgcagcgggtacctgttccagggaaggtacaaaagccagcccatcgaagacgaggcgtacctgatcggcgcggtgacgtacgtgcaccaaaatcctgcaaaggcgaatatctgccccgcgaatcaataccagtggagcagctacgccgaatacgtcggcacgcccgaccttgtcgacgttgagttggtgttgggggcgttcgggtcgagagatgcgtttgtgaggcagcacgagacgcccgtgcaagacgacaagctcctcgacgtggacaatggatggcggatgagcgagtctgaatcgctgaaagttgcgcggaagctggttggagagcacgagctcgctcaagtgaaggaatacccgagacgacgccgcgatgctgtcgtggagcgtctcctgcaggcgaacatctccgcgggcgtcatcagtaagatgacgggaatctcgaagtcgacggtcgcccgcatcgcaagaaaatgacacgatacccacggcccctcgtgtcaaaatgaaccgatacccacggcccctcgtgtcaaaggagaaggagaagcaatgctgttcatcgaataccccaagtgctctacctgcaagaaggccaagaagtggctcgacgggcatggagtcgactatgtcgaccgcgacatcaagctcgacaatccgaccgcaggcgagctccgtgcgtggcatgccgcctcgggcctcgaccgcaagaggttcgtgaacacctctggcatgctctaccgccagatgggcctgaaggacaagctgccccaaatgtccgatgacgaggttttcgagctgctctcgacagacggaatgctggtcaagcgcccgctcatcatcgacgaggaccgcggcatctacttgaccggatttcgcgaggaggagtgggagcaggcgctcctgtaagacagcttctcatagctgctcgtgagcatcttgtggagtgagcgccccctcggtaacgggcacgtgacgtctcgtttgcccgagcgcatccccctctacactggtcgtgctccgggggagtagtggcgtcccatcgcggacgtgacaaagccaacatcatggtgcattcgcgcctggttcgtcttaaacgtcgagacccgcagcacaagccgacgagacttgcgctgtgggtctcgcgctatcttcaggcaagacggattgaggagaaatggacctttcgattttcgcatcgcccgaatcttgggcaaccctaaccacgcttctgttcctcgagctcgcgctcggcgtcgacaacctcgtgttcatcagcatcacctccgagcggctccccaaggacaagcagcatctcggccgtcgcctcggcctggccggcgcgctcgcgacccgcatcgtcttgctgctgtttgcctccgcgctggtgcacatgaccgccccgctcttcacgctctcgctcggaccccttgcgcacgggttctcggtgcgcgatgtcgtcttgctgagcggcggcgggtacctcgtctacaagggcgtctccgagattcgcgagacgagcgccgacgccggcgagcgccaggcgtcaggcgcttccccacataagggcatcggccttgctcaggccgtcgtcacgatcgcggccatggacgtcgtgttctcgatcgattcggtcatcacggcagtgggccttgccgaccagctcgcgatcatcgtcatcgcggtcattgtcgccatcctgctgatgatgctgttcgtcgaccagatttcgcgcttcgtcacggagaacccggggatcaagctgctcgccctcgtgttcatgaccgccattggcgccctgctcgtcgccgagagcatcggcttggggacgggtgtcgaggttggcagcatcgacctcgagaagccggtcgtctacgccggtcttgcggtcgccatggtcgtcgagctcgcaaagatccgctctcgcaagaatggcgggataagggagtaagctgccgaaggagttctagaatgagctttagaatgtttgaattacaacagtcaatgcggcagcctgcatgcgatagtggcaccgtcaactaatgccatagttcgatcgttcgaaaaggcccctttcacgcaggggccttttcgcgtcttttggcacgaggggccgtgggtatcgtctcactttggcacgat

SEQ ID NO: 4528 - DNA, 7887 bp, Unknown
  16S sequences of unknown bacteria
attcggcaggaggtgtaaagagatgccaaacatcaagtcagctaaaaagcgtgtaaaggttattgcgaccaagaccgcccgtaacaaggccgccaagtccgctctcagaaccgctattaaaaaggctaacgttgctatcgaagcttccgcggcagataaggacgtcgttgtcagagaggccgtcaagaagatcgaccaggcagcggcaaagggtattattcataagaataccgccgcccgcaagaagtctgcttttgctcttaagcttaacgaaagcaagtaaaggcccgaaaagctgcttgttcagccgtgttatgaataaacagtatatacaaaagagtcggaaagacatttctttccgactcttttttcatgtcagctcttttctcagcttcagcagcaccgctttttcccttcgcgaaacgcccacctggcttgtgcaaagaactttcgccgcgccgctttgggtcatgcggtcgacatagcgaagctttatgagctttttttcatcctcgctgagcctttcaacggcctgagacagcgacatgctgcgtataatgctttcctccccgcctgccacggcaggttcggcgtcccgtccttcttcgccgctcagcgaaaggggaattgccgcagcagacaccgcctcggccacctgttctaaggagagtcccgagtgctccgcaagctcggacagcgcaggctctctcccgagccttgccgaaagctcggccttcattctgacgattttctgcgaacgttcctttaaggtgcgccccaccttaaccgtaccgccctcacgaaaaagacaccgtatttccccgagaattaccggcacggcataggtggagaatttcacccctctttgagggtcaaaacccttgattgccttgcaaaggccgaggcaacccgccgaataaagctcgtcatattcaattcccctgccctcaagcctgtgacagcaggcatgaacaaggccgagattttgccccacaaatccgtcggtcagcgcaacttcgtttttatcggtcatttgcgttttatgaatttttccatggtgacggtcgttcccttacagagggacgagcgcaccttaaggctgtcggtaaagctttccataacggcaaagcccagtcccgcccgctcctcgccgccggtggtaaaaaggggctccatcgcccgttttacgtcctcgattccgcagcccttgtctcttattttaattctgatccgcccgtcctcataaattccgacggttatgtaaatcgggccgataatatttttgtaggcatggacgatacagtttgttaccgcctccgaaacggcggtttttatgtctccgatttcctctacggtggggtcaagctgcgacacaaaggctgccgccgcaaccctcgcgaagctttcgtttgacgacttggaggacagcgtcagtttcatttcgtttatgggtcttatcatttttttacactgctcctttcgataaggcaaaggcggtcgagtcccgcaattctcatgactttatatatctgcggcgacgttcccgtcacctgaagctcgccgtcgtaaaatttcatttgacggtaccgacccatcacaaggcctatgcccgagctgtccataaaggtcacgtcgcgaaaatcgagtatgagcagcttgacatttcctccgtcgatttccctgtcgattttttctcttattcttgcggccgaatgatggtcgatttcaccctcgagataggccgtgacggtttgtcccgagctttcggttcttactgacattttcattcctccttttttataattttaataggtgcgccgcgatttttttagtcggaaagcaagtcgaaaaagcccttaaaaaagggctttgaccgaaaatttttcatcatcgcagagattttgtatttttaaaaggcaaagcttgattttggggattttgccgtcgcttccgccttgcgccatggcgtaaagctcggtgagctgttcgtcaagctcgtccaccgaggaatgggaggcaaaaacggcggtggtttcctttatgtcgttccagtttgtcattgccttttcgagattttgaaaggcggcgtcatcgttttccgaaataaattcatcgaggctctgctcaagaaacacccccacgcggttttccacccgccttgtgagacaggagcttgtgacgcacatggacagcacaaaaacaaacagcgcccccgccgcataaagccgtttcatcatttatcctcctttttgataagacagacgtcgttttttccgtcggtgatgagcacaaagacctgcgacagctcggtttttctgtccttcagcagctttttgagcttttcttcgctcatgccgcaaatctcaagacccgccttacttatccgaccgtctcccgcaacggcaatcggcataccgtcgggctttggctttaaatcaagcatttcggccgtcacctcggatttttcatatttctttttaacgctcagttttcctccggtctccaccacggcaaaggccgcgtccctgatgtcgaaaacgccctgctgacggagaccttcatttacgtcgtcaattgtcatgcggagatttttcatggccttctgatttatgctgccgttatttataataaccgtcggactgccgtcaaacaccctgcgcaaaaagggcagcttgagcgtcgccacagacagcacgatctcgagaataaccaagcaaaatatggctataataccgttgagcgcgggacggtcgagatcctgaatgggggcggcggcacattcggaaatcataattgtcaccacaagctctcccggctgaagctcgcctatctgcctttttcccataagacggagacttaaaataacggtaaagtataaaattaccgaccttgcaagtgtcacaaacataaatatcacccgttctattttgcgtcggcgatatttttttattccgaaaagagggatattttgacggttgaacaaagcagatttttgtgcacgtctcttgaagaaaacatggcggtaataaatcgggaaatcggaaattccgacgattttatttcccgagatatgacggtgtgcggcttcgatttttgctgtctgaccatggaaaacctttgcgacaagcagcaaatcgagcagcagataataagaaggctcatgtcggtaaagtcgctcccgaaaaacggaaagcagcgctttgaggcggtggaaagcggcatttgcgcctctcccgaccaaaagaaggtgcaaaacatcgacgagctttatcggcttataatgtctgggtgggcggcgctgctttttgacggctgcgactctgcgctgtgcatcggcgttcaggacacacccacccgcagcatcaccgaaccaggctcggaaatttccgaaagaggttcggaggagggtttttcggaaattctccgcaacaacatggcaatggtaaggcggagaatgaaaaccaaggacctgaagtttgaaataatgaccctcggcgacaaatcccgcaccgatattgccctttgctatatggaacattcggtcgacagcgacattcttgaaaaggtcagaaagcgtctttttgaggttgaaatcgacgccgttctcgattcgggctatctcgtgccctttctcgacacaaagactccgtctcttttcccgtcggtgggggtgaccgaacgtcccgacaccctttgcggaaaaatactggagggcagaataggcatacttgtggacggaacgccctatgcgcttaccgttcccctgcttttttccgagcattttcaaagtcccgacgactataccctaagcccgttttttgcgacctttatacggtgtctcaaatatctttcctttatacttgccgtgcttgtatcgggaacatatgtggcaatttgcgagcacaatcccgagcttttccccgccgcaattctgcacaaggttttcgattcgggaatagtgaccccttttccgaatatgtgggaagcgcttataattcacgtcatatacgaaataatgcgtgaggcgggactgcggctgccaaaatcggtggggcacgccgtcagcattgtgggcggactggtgataggcgatgcggcggtcacggcagggcttatcggcgcccccatggtcatagttgtcgccactaccgcacttgcatcatatgttgttcccaccctctactacccctgcgctctgctgagatttgccggcatttttatcggcgggctttgcggaacgacgggaatggtgctttttgcggcggtcattgtgacggcggtgtgcggccacaatgtatacggcgttccgctgtcggcgccggtgtcgccctttgacaaaagctcggtcagagacaccctccttcgtcaaagctggcggacgcttgccaaaagaaccgcgaaaattcaaaagcttcacggcagcaaggaggaggacgcacggtgaatttaaagaaagaaatcggaaccggtcagcttttctgcctgcttatcgtctgccgtttgtcggtggctctcaccttcccctttgacagcgtgggaagctttaacaaccaggaatggtttgcggcggtgcttttctttcccatacttctttcggtcatgtcttttttgctttttttctataacaaaaccgggctttgccccgccgacgcggccgcaaagacatctccatttttcggaaaggccgtcagccttgtgttttcggtgttttttctgctcagcgcagcggtaaatctgtcgcggttcaacattttcatgacctcaaccacaggcgccgaccaaagccccctgttctttccgctgcttcttataattccctcggtctatgccgcctataagggaatagaagccatttcccgaacggcctgtataatactcgtcattgggcttgtttcggcggccgtcataattctcgccgtgataccgaaattcgatatgctgaacgtcctgcctccccgctcttccgaccgcaaaaatgttgcaaggcttcttatgacctatttttccggcacgtcggaggcggcggcctttgccgttatgctgcccaaagcccgcggcaaaaaaagatttcttccggcagccttttcggcggcggtggccttcggaatgtttgcgattttcttttcggtcagcgccgttttcggagaacttgccgaattcgaaaatttcccttttttcgccctcgccgacattgccgagcttggcgagcttaaacggctttcggccctccacgcctccacatggattttggggctgtacgtcaaatgcggcctgtttttacagctttcccgcagctgtgccgaaagggttttcgaaaaatcggttttaaagccgctttcggcggttggaatcgccgccgttttcgtcctcggcacgcttatgtcctcaaactatcgctatgccaaaagccccatatactcggtttccctctttatctcggtcgcccttttgaccgtagtgctccccgccgttttgcttttaacacaaaaaaataccgaaaaatttcggtcaaaagaaggtgtgaaaaattaaaaagccccttgtgtttatacttgtcctatcgctgctcggccttttttcgggatataacgggcgggtgaaaatcaaggacagggtcatcattcagggtatggcggtggacgtggcggacgaaggctattcgctcaccgtccagacctataagcccagctccttaagcgagccgaaaaacgaatacgagctccacacggccgacggaaagactcttttcgaggcgctgaccgccgtcaacaccataacaggtcagcaggccttcttttcaaatctccaaatcatcataatttcccgcgaggcggccgaaaaagggcttgccgatttgctcgattttttcgcaagatactctaaaatcagaaaaagcgtcacggtggtgggctcggagtgccctgcggccgagcttttgacggttgacagcgaaagcggcttactccccgccgagcgcataaacaaaatcatgagctacggaaccgacacctcaaactatgacggcagcaaacttatcgacattaccgagcgatatttaagcgacgcctccgacgcctttttgccgattttggacattcgggaggacgacaacgagaaaacggtcaaaatttgcggagtgctttgctttcgcggcagagcccccgcaggaatgatctccccccgtgaggccatcggattcaattggatttcaggctatgacagccgccaaagcattttgcttgacaccgaaaaggcgcttttttcgctgtcggttcaaagcgcaaaatgcaaaatcgacgcaaagatggaaaacggccttcccgtcatcacaatcggtctttcggtgatgtgcaatttaaacgaggtcggcgccaagggagggccggtttcggaggacgacataaagggtctttcgccgcagctttcaaaacaaattgagggcatggcgaaggactcggtcgacgcggcctttttcgggctttccagcgacatttttgaattttctaaaatcataagaaaaaaattccccgattatttttacggcgaggccttcggacaaattcccaaaaccgactggcgtgttgaaatctcggccggcgccgacatctaccgtgttggcaagaccaaccgcaccgtttaaaaacaaaaaccgccgcagcgaaaatcttacctttcgctgcggcgataatatttattcggcttttatttaagcatatttttcatcttgtcgagagccccggttttctgaagggcgacggtgatgattattgcgatgatcgttccgccggcgctgctcacaaagaagggcacgacaaaggtgaaaagagccgccttggagtttccgaggataagagcggcaatggggtatgacagcataccgcctatgaccgaggtgccgaaaagctcgccgatatatgcaaagggaagctttttaagatatttataaagcagtcccgcaagcaaagcgccgcacatacttcccggaaacgcaagcagcgttccaagtcccgtgagattgcggataaggctcgcgacgaaggctgagccgactccccatgcggggccgagggtcacggcgcacagcacattgacaaggtgctgaacgggagcgcatttagagccgaaaaccgggaaggaaatcatgctgcccacaacggcgacggcagtaaacacggcggtcagggtgagttttttgagatttgcttttttcatttttgtcctcttttccgtttccgcccgaaaagaggacagaaacaattattttttaagctttttgtaacaaccctgtgccgcaaggcaaagcagggcggttataaccatatcaggcagggtatatcccacgataatgtcgacgttcataagcaggcgatagcaaataaatccgacaagccacacggcgagattgataaaatcaaagcccctgccgcggctgtcctttttgattatgaaaaagtcggcaatctgaacggcaatcatgggcgcgaaaaccgaaccgatgaggtacagaaaatcggttatatcatccatgggccaaattacggcggcaaccgttccgataacggtgacggcgacggcggcatacttgcccttgattttactgaaaatggactcgaaggaaattcccgcggaatatgcgtcgaggaaggtggtggtgacggtggagaaaacgatgatgagcagtcccgcaacgccgagtcccgccttaaccatgatttcggcgatgtcggagccctcggtcagcatggcggcgcccattccgattatatacatccagcagctcacaattccgtagacgattgccgaaacggcggtggctttaaccggcttttcggcctcgcgggtgtagtcgcttataaggggcagccaggaaagcggcatggcgaccga

SEQ ID NO: 4529 - DNA, 5119 bp, Unknown
  16S sequences of unknown bacteria
gaagccggagaggatgaacacggtggagggcaggcccatggcgatgaacaccagaatcaccgaaagcgggttgtccatcaggcccaggcttttcacaatctgaaacagcgggatgacggccgccttcagcggcagcatgataccgctcaaaaacagcatgtacagcagcgtgtttccccggaatttgtagcgggcgatgccataggcggccatagagccaaacagcaccacaaagaccatcgcaccgccggtaaagagcaggctgttgagaaaataacggccaaagcccttgtcaacccagatggtgacgtagttctcaaaggagaaggattcaggcagggaaaagggacttagcatgatatcccgggtggatttgaaggaggacatcaccatgttgaacagagggtagataatcaggagcacataggtcagcatcaccagctgaagcaggatgataaacacctttttccctgggcttgcattgcggtagcgcatgccggtgttcacagttccacctccttggacttggtaaagaggatggagcacagcgaaatgccgaaggtcatcaggtagatgaccacggcgatggcggagccgatgccgatttccggcgcgccggaatccaccgatccaaaggccgtgcggtaaaacagcgttccgatggtgtcggtggcgtagttgggcggtccatccagtccggccatggtgtagacctgctcaaatacgttcaggctgccgataatcgtcagcaccgaaatgatcgtgatggaaggaacgatcagcggcagaacaattttataaaacatctgccattcgtttacgccatccagataggccgcttcggtacactcggcaggcacgttgtcgatggcgctcataaacaccagcgtgggaaaaccgacccatcgccagatgttgactgcaatgatcgtatacgtcgcgatggacccgtctcccagccaggcgcgggtcaggtcctgacggcccataagggacagcaggctgttgaccattcccttgggcttgaggtacaggccccagagaaagcctaccgcaatgatggaaaacagtacgggaataaagaagatgcggcggtatgcgccgtgcccggcgatgccgcggctgagcacatagccaaaaagaatgcccagggtgttttgcaccagcatggtaacaacaaaccatttcacgttgttacccagagcatttgtaaagcgttcctgatagggatagccggtaaacagcttctgaaagttttccagcccgataaactcgccccggatcagctggttccagctgaaaaagctgttgaacagcgacatgaacaggggcagcagaataaaaataaaaacgatggcagcgccgggcaaaacgaagaaggtgatccaggcggccttcttccagtttcgggccttggtcatggcggtacctcctggaggcgggtatagtgattgaaaaggtgaacgggagaagccgcatggacggctcctcccgctgcgtggcaaaaagttacttctggaagggctcataataggaagcgatgccgtcctgcacgatctggcaggtttcctcggcggaggccttgtcaaccatcaaatcctgtgcggcagactggaacagggacgagccggtgggctgctcatagcggaaaccgaccaggaagatatagggggtagaattcttctgcagatccagcaccttggcgataaaggggttggcggacacgtccacacccggaatagccgagaccatggccaactcgctcacgatgcgctcgccgaatttgggggtggccaggtactttatgaagcgcagcgcggcatcctgctttttggtgctggcggagatggaaaagttcatgtcggcatagaccgacacataggcgggatcctccgccgtcatgcccggaacggcgaacacgtcgtattccagatcggggttctcggcgctgaagtagccggcctcgtaggagccgcccacaaaatgcgcgctgatctcgttgatgaagttggcctgcatgtcggtgtaggccacgccttcgaacatatcgggcatgtatggggccaggtccttgatcttctgcacggaatccacaaagacggggtccgtgaacgtggtttcgccggcgacgaccgcattgtagaaatcgttgccgccatagaaggagggacctacgccgccgaagaggaattcgcagcaccagccctctttcgtgccgttggccagggcctcataaccggcagccttgcaggcttccagattggcgaggaattcgtcccacgtcgtggggacgctcaggcccagttcttcgtagatcttggtattgtagaagcacagcatggtctgactcacggcaggcacgccatagatctttccatcggtgatggaggtggcgccgccgcgggcggattctgagaaattctcaagctcgggcatcagctcgtccagcgccagcatatagccggagtcggcaaaggtttgcagcccgccgtatgcgcggctcatgaacacgtcgggcgcgccgtcgccggcggccagcgcggcggaaaggatggtgttgtactcggtgttcttgatggcgttctgaaccactttgatgtcagggttggcggcttcgaagtccgcgattacggcgtcatagaatgccgtgtcttcgggacgccaggtccagaaggaaatttcggtcacttcctcagccagtgtggggatcgccaacatgctcatcagcaggcacagggtaatacaaatgccaagaaactttttcatgttgagggtctctcctttcgatttttatggtcgtcttggttcttgtttatggttatgctggctcttagtcacagcatatcaaaccttcacgggtttgtcaatagatttcttaattatctaaaattaatttcctacgacatgttttgcaaaagaaatattatgtggtttattaacagaatattagataaaaataagtgaataattcatattattaaagaaaataaaaacatagaatcatgatttatttgaaaaaacattgaacacatgctggttttcatgtatacttttcgcagaacaccagcgtctgaaagagctcatgatacaaggaggtacgtgagatgggggattgcatcgtaaggctcaatcagctgatcgatcagctttcgccggcggaggcacgggtggcacgctatttgctggaccattgtcaagaggccatcggtcaacccatcgaaaaggtgtcggaagcttgccagaccagcaaagccacggttgttaggctgtgcaagcagcttggattcaagggctataaggcgctgtcaattgcgctgtcgatggaattggccagcggcggcgagaaccggatttcctatcaggacatcaatccaggcgataatattcataccatcatagaacgagtgagccagcacacgcaggccgccattgcggataccgtccgagtactgcgggaagaggatgtcttgcgcgcggtggatgctttggacaaggcgaaacgggtcgatttttatggggcgggcacctccgcgctggtcgcgctcgatgcgcagcagaaattccagcgcctttgccgtgatacccagaccagcaccgacccgcatgttcaggtggtcagcgccagccgcctggaacggggagatgccgctgttttcttttcctattccggcgaaaccgaagatatgctggacacgcttgccgttgccaaaagaggcggcgccgtgaccatctcggttacgcgctatggggtgaatcgcctgagccggggagcggatattcccctgtatgtggcttcctccgaaatgctggtgcgttccgccgccatgaccagccgcatcgccatgatgcacgtggtggatattctctattccgccgttgccgcgcagggctatgaccgctataagccgtttctggacaaaacgcatttggcagggcgcgaaaaacggcgtaaccaacacgagcggcgcagatgacgacgactttgacacaggggagaaaagcatggaaacaagaaggtatttatcggggctgagtacagagcagatcaacactgaaagcacttcgctggatacaatggacggtcaggagatagcggctctgatgaaccgacaggaccacggggtggtggaggccgttgcgcaggccgtgccggtcatcggccgcgtaattgacgaaatcgccgcccgcttttcccgcgggggccggctgttttataccggtgcgggaaccagcgggcggctgggcgtgctggatgcatccgaatgcccgcccacgtttggtgttccccgcacgatggtacagggtatcatcgcggggggagatgtcgccctgcgccatgctgtggagggagcggaggacaactatgcccagggacaggaagacctgaaacaagcggccgtcggccggaatgatgtggtggtcgccatcagcgccagcggctacgccccttattgcgtaggatcgctggactatgcccgcggcgttggagcgctggcagtttcactcgcctgtaatgagcatacggaactggcccggcatgctgatctggccattgaggcgcccaccggaccggaggtgctcatgggttccacgcgtctgaaagccggcaccgccaccaagatgattcttaatatgctcaccaccggcgcaatggtacgcaccggaagggtctatcagaatctgatggtggacctgtgtatttccaacagcaagctttccgaccgggcgctgcgcattctgcgccatgcgacgggcgtgggggaagaggatgcctcgcggcttctcaagcaggccggcggcagcgttaaaaccgccattgtcatgcagttgggcggcgtggacgccgatcaggcgcgtcgggcgctggaggagacggccggctgggttggtccggccattcaaaagctgaaggtctgacgccgggacggctgaaattgggcttgggattacatctggggggacttgatgttatctccgcttgcgctttatgcatacggagtgcgtcccacgtgcccatcatgtgcccataatgattttgaattcaatatagggaggaaatctgattgaacattttcgtatgcatcaagcaggtgcccagcacaagcaaggtacaggtgga

SEQ ID NO: 4530 - DNA, 2048 bp, Unknown
  16S sequences of unknown bacteria
agtacgactccaagaagaccggcggcgtgaccatcagccacctgcgcttcggcgacaagcccatcaagagcccgtactacatcaacaaggccgacttcgtcgcctgccacaacccgtcctatatcaccaagggcttcccgatcgtccgcgacgtcaaacccggcggcgtgttcatgatcaactgccagtgggatgacacggagctggcgcatcatctggacgcggcttccaagcgctatatcgcgaagaacaacatccagctctacaccatcaatgccattgacctggccatccaggtcggcatgggtaagcgcaccaacaccatcctgcagtccgcattcttcaccctggcaaagatcatgccggaggaggacgccattgcttatatgaaggcagcggcaaagaagtcctacctgaagaagggccaggacgttgtcgattgcaactaccgcgccattgatgccggtgcgacggccttccgcaaggtcgaggtcccggccgattgggccaccgcttccgacgtctgtgacgatgctgccctgaccggcaagccggctctggtccagcaggtcaaggacatcatgatccccgtcggcaagatggacggcgacagcctgcccgtctccaagtttatgaactatgtcgacggtcagtttgagctgggcgcttccgcatacgaaaagcgcggcgttgccgtgaccgtccccgaatgggacagcgcaaagtgcatccagtgcaacaactgtgcttatgtctgcccgcacgcgacgatccgtcccgtggcactgacagaagaagaagcgaagaacgcccccgctgctgcgaagatcgttccggtcaaggctggcaagggcaagggcgtctactcctacacgatggccatctccccgctggactgcatgggctgcggcgtttgtatcggcgtctgcccggtcaatgcgctggccatggttccacaggagtcccagctgccgcagcaggatgtcttcaactacgccgtttccgaagtgtccgaaaagaaggacatgcaggacaacaccgtcaagggcagccagtttaagcagcccatgctggaattctccggctcctgcgcaggctgcgccgagacgtcttatgcccgcctcgtgacccagctcttcggcgacagaatgtatatctccaacgcgaccggttgttcctccatctggggcggccccggcgcgacctctccctactgcaccaacaaggaaggccacggacccgcttggtccaactccctgtttgaggataacgcagagcacggcctgggcatgtacaccgcgcaggacgtcatccgcaagagcctggccgcgaaggtcgctgccgtcatgggcaacacctccgacgaagcccgcaaggccatctgccaggactacctcgacaccatggacgacggcgttgccaaccaggctgcgacgaaagccctgatcgagaactttgaagcctgccagtgctgccagaatgtcaaagacgtcctggcccagaaggaatatctgaacaagaagtccgtctggatcttcggcggcgacggctgggcttacgatatcggcttcggcggcgtggaccatgtcctggcttccggcgcggatgtcaacatcttcgtcttcgataccgaggtctattccaacaccggcggtcaggcttccaaggcctccaacatcggccaggtcgcgcagtttgcggcagccggtaaggaagtcaagaagaagagcctggcggagattgccatgtcctacggttatgtctatgtggcgcaggtcgccatgggcgcaaacccggcgcagaccatcaaggccatcgctgaggcggaagcttaccacggtccgtccctcatcatcggctactccccctgcgagatgcactctatcaagggcggcatgatgaactgccagaaggaaatgaagcgcgccgtcgactgcggctactggaacatgttccgcttcaacccggcagcagaaggcaagaagttcaccctggattccaaggccccggctggcggctatcaggaattcctgatgaacgaagcccgc

SEQ ID NO: 4531 - DNA, 4179 bp, Unknown
  16S sequences of unknown bacteria
atatagcttccgcggctggctgcgatggctacattgagcgccgtgctcagccccttgtgccgcggcagacggatgagccggatgcgcgcatccagcagcgacgcctgatcgatccagtcccttccctcgccatgcgtcccatcatccaccatgatcagctcccagtccgaaaatgtctgggaacagatagacagcaccgcctgaaacaggatctgacggctgcggggctgatagacccccatgatcacactgattttcacttccatacgtctcgatccatcctctcatagatttcctgcatgatccgatgcgtatgccgcttttcatactgccatacggagatcacacagcgcttgcgcagctggccgcgctcagccgccggcatggcacgcagcttcttcagcgcctctcccatctgctcgctcagcttctgcggggcgcacagccagccattgagggcattgctcatgtattcccgagtgccgcggttatccgccgcgatcaccggaatgcccatggacagcgcctccagcgccgccatgcccaatccctcccgccgggaagggaacaaaaagacatcggcacagccgacgatggagcggatatcactgacatgccccagcaggcgcacattgtcctgcagcccgcatgcctggatcatgtcctgaaggcgtcgggcgaacggcccttccccgcagatgagataacgcacatcccgcatgtcccatccctgcgccttcagctgcgcaaacatgtgcaggaccgcctcatgattcttattgccgttgagctcgcccgccgagacagccagaaagcaatgttcatccacctgcagcgccctgcggcagcgaagacgctcatgcgggcccatcaccgtgaaatgcgccatatccagcccgacgccggggatcagccacacgcttcccccgggcttcagcttcagccgcctggctcgggagtgatcctcctcattgatggtgatgagcacattggtatgagccgccagcgcacgctcagccagataatacaacgtgttattgagcagcggcgcgcccttgtaaaaatgaaagccatgggcggtatacagcacatagagcggacatttcgacagtctgccagccagcctgcccagcacgccgcccaccggcgtgtgacagtgcagcacccggatatccagcttctcgatgagcaggagcagctgagcaagcgccgtgcggttgtcatgatacagatagggagagcgggcgacgctgatgtgatgcatgatgacccccatctgttccatcacctgtgtctctccctcatgatgctgctcatgcatattggccgcgcagtgcacctcatacccaagcgactgcaggatgcgcacatcgcctcgttcgaacttatagagaaagctgctcacattcgccacgatcagtatccgcttcacctggatccctccaccatgttcattcatcgtttagtatggctgttcacacacgggttatgccgccaggatgaattccttgaaatgcggcaggaaacgggttaaaatgaaatcaatgtaaggggtgccatgatcatggcatcgaggaggaaacatggaacgacagaaaactgtgtacatcaccgggcaccgtcatccggacacggactcgatcgcgtcggccatcgcctatgcactgctgcagcgccgcaagggcatcaacgccgtcccttgccggctcggtccgatcaatacggagacgcgctggctgctggagcgcttcggctttgaggaaccgatgctgttcgaggatgcccgagccacgataaaagagatcgacatggacccgccgctgaccatcacgccggaaacgacgatctatgagacgctgcagctgatgaagcagaacaacaagcagtcttacggcgtcgtcaaccagaagggacagctgctgggcatggtgacccgcagcgacctctcccgcgtcggattgggcgataccgccgccgccatccagctgctcaaggatactccgctggattacatcgccaagaccatccgcggcttcttcgcctaccgcgatgaagaatatcacttcaacggcaaggtcagcatcatcgccatgacagagaccgggctcaacgactatgacatccgcgaccggctggtcatgctgggcaatgacaccgaggcgcagaaggccgccatccgcaaaggggccggcatcctggtcgtcgtttggacaaaggagatcgcgccggaagtcatcgagctggccaaagcgcatcactgcccgatcatcatttccggacacggcacgatgaacacttcccgttatctgtatttcgcgccgccggtgcggctgatcatgctgaaatcgctggtcagcttcaatatggacgaattcgtcgaagatgtcggaaagaagatgctgaagagccgttaccgcagctacccggtcatcgacaacaacaactatctgcgcggatacctttcccgctatcatatcctcgactatcgcaacaaacaggtgatcctggtcgatcacaatgagtacgcccagtcggtcaaaggcgtggaaaaggccgatctgctggagatcatcgatcatcaccgcatctgcgacatcgccaccagccggccgatctccttccgcaatgagatcatcggttccacggcatccatcatcacctccatctatatggaaaaccagatggacatccccaagaatgtggcgggcctgctgctgggcgcgatcctctcggatacgctgaagttccgctccccgaccacgacgcccaaagacatcggtctggccaagacgctggcacatatcgccgacctggacatcgatgcctttgcttcagagatgttccgcgtcagctccaacatctcgcagaagagcgtacaggaactgatcacccaggatgtcaagacattccagatcgattctcacaaagtcatgatcgcccagatcatcatctcggcggtcgatgaggtacacagcatcgaagatgagctgcagcaagagatgaacagcttcgccatcgacaaagaactggacctgttcgtcgctgcctttaccagcatcctggaaaacggttctatcttctatgcatccggcccgctcagcgagatcgtgaccgaagcattccccaaccatcacggtgcacacagcttccaggaagacatcctctcccgtaagaatcagatcgtgccgctgctatcccgcgccatcatcaactccgcgggatgataaaaacccttctgcaggccacgcagaagggtttttgttataattcaatgattggcaacgattaatcgtctcatctaaatatttcctcgtatactgtattcttgaagaacatcaaaaagaatattattaccctgaagtatatgagaaggtgaatggttaattctataaattcaaaattgttacactctgcaaactacattaaaagtatacacttgcattaaatcacctgtaccgtgacgcacagtcaagcgattggtaactgtcatcgtatcatcagtatatgtagtaaagcccgttggatgactaaagctcatttcatttgaatgctttttttgtgtatactgattcacgatcacaaggccgagcagccaatctctattgtcaaatgtcaataattggctagagactcgataatctccatcaattttataatatccgcctcccgcatgttgaagcaggcgcatattaccatctaacgtatagcccatgttggcaattcccatgattccatgttgttgatccggactttctgcacttgactcttgatagacagaaagtgctgttgcaaattttaaatctgtatcattttcaacaacatttgtcgtatcaattgtgtaagtctttaagtatcctatcgaaataaaatattcgtaaaatttgtatcatcttattaataactgaagttatcttttcagcgttccatcctgccatcatgatatagacgaaaggcagggcgatgtacacatagctcgcctgcacttcgatccacagatacacaaagaatatcgtaaagaagatgcaggggatgaacagcttcctgtgctgtgcgcatcctgatcttcataagctgcgccagctggcaaacagcgtcaggaagacccagaaaaactgacaggaatccagacagccaagcagcagcgtcagcgtctggctgccagcctgtgagatcggataa

SEQ ID NO: 4532 - DNA, 14427 bp, Unknown
  16S sequences of unknown bacteria
cgatttgaaatcgcaagcgcctttttaaagtcatccctgttttttaaggcataccagcgtttcaggactgttttctttgtcaaggaaaatcatatcgctttccaccccgtccgcatattttacagggaacttaaatttaatagattttataatcctttgattttgcctttcagggaaaatatgtatttcagcgacaaaactgtttaatacctctttcttttccgcgtcggtaaattgagcgtagaatttatcaaagtttatcaaacattgatacgccttttcggttgatattcgttccgatttgatattgtccaagcgaatattaagcgtttcgatttcttcctcaacggcggcaatctcttgataaaacctatctaacctttcgtccatatcatcatactttttatcatagtacgggtcggttatatccagcgcgtccattttataaacaaggtttttctttgcgccttcaagctgtttcttctttttttccaacgaagcaatttcactttcaatttcgcttgtatcaacggacttgttcagatatttttcaagtttttttatgattttatcttcttttacaaatttaccgataatttccgcaactgcttcatttataatatcttgattccaattttttcgataatcacacctaacgcccggtgcagattcttttctatgtttgcaaagatatgtaaaattgtctttgtaaaacgtgccgtcttttttctttttacgatttacgccaccgtacataggagctccacaaataggacatctcaaaatacccgataaaatatgctcgtgttccaagctgtatattttttcgtgtttaatagagctcttttgtcttttgcgatgagcttcgtcccatatctcctccgacacaatagcttcgtgaacaccgtccgctaaaatgtaatcgtcctttttctctatgcgatattggtctcttgtgccgggaactcttgtcatacaacgccgtccgaatgctattttaccacaatatacagggttatccaaaattattttgataaggtgcggtgtgaaaaattcgtacttgttatttcctcttaaatttttcttaaatcctgcattgttcagatattttgcgatacctgatacgcctaattgcgtattgacatacttatcaaaaattattttaacggcttctacttcatcttcggcaatctctaaatttccgttgactaatttatatccgtaaggagcaaagccaccgttccatttaccctctcttgctttttgctttcgcccttccattgtttgaactaaaatattttctctttcaatctcggcaacggctgacaaaatagaaatcatcagttttccgctatctttggaactgtctattccgtcctcaacacatattagattaactccgtagtcttgcattttttgaagtgaagaaaggacgtcggctgcatttctaccaaaacgggaaagtttgaatactaaaacgaaagatactccgtcaatattgttttctatatcttccaacatttgtacaaattcaggacgtccgtttatgctttttcctgatttaccttcgtcgctgtactctctaacaatcgtccagttttgatattccgcatactttatcaatttttctttttgagcgtccaagctatatccgtcaacctgcatactcgtagatactctggtataaatgtaacactttgtccttttattcatcaacttcactcctttttatcgtttggctttttttcggcgggctctactttctccgcatatttttctataagttttgccagtacattgacaaatctttctatttctacatactcgattttctcacgaatatatataccttcactgatttttctcttttttattctgtgcactaatacctccttatttttcgattaactaatttagtatcagcgcactttttatcgctaatactattatagcatatttattataaaaaatcaaactattgtggcgacttttgcttgacttttccgcaacttttttgtaaactactcttaggtgatgaaaatgagcgatttttcgataagagaacatattaaaatttttttgaatcaatggcaaaaggataatgccgtaagcgaccacgcttttgcaaatgccgtaggcgttagctccgcgtccgttcgcaggtggaaacttggtaaatgtattcccgatatagatttacttccaaaagtatgtgattttatgaacgtatcaattttggattttatgggattaaacgagacaacttgtttatcccaaaagcagatacagatattgacaaaatataaaaatgataaagcatttcataaccttattgacaaatatatatccgatactgaatttcaatccgcacttgatacctttattaaacttatgaaataaagcgtctttcccaaaaaatttggaaaggacgcttttccttttctatcaaactaaatcaattttgcccctctcctttataatcctaaaatttgcattatgattgtagcggcgtttacgtaacaacgccttattgatgttcgcgttcatgatcatttcccgcataagccgtacgacttgcccgtagaactcctcgtctttgctgtgagcggaatgcccgctgccttccgtttcctcgtcctcgatgtccccgaactctgccttgattaaaagcggcaatccgtagtcaagcgcgtcgttgatgactttgttgaacgtattcttatactgcggcaaagccatgagtttttcgatttgttcccatttgtcctcgtcgcggattgtgataaacttccgaacatttttatccgtattccgttcgcccctcatgccctgccctcaaaagaagcgggtttcccgcttgcttcgtttcgccccgcgaaacggtcaagaaggcaacttgttgcattcttctttacctgcttgcagatccccactttttgcaacactttttccatagtcctaaccctaccaagttacctgtgcgatccgcgcttttgccttttctatgaaccgctcgctgatgtcgatcccaataaagtcccgccccaaccgtttcgccaccgcgcccgtcgtcccgcttccgaaaaacggatcaagcaccacgccgccctgtgcgctccccgcaagaatacacggctctatgagcttttcgggatacattgcaaaatgctcgtccatgcggtaggtgttcgtgctcacttcccacacgtcgcgcttccgctttccctcctgcggaaagtccgcaaagttttcccgttcccgagagatgccttgctgtgcggtatatttattcctttcaccccttccgcgtttgtaccgctcgatgctcacctgttttaacggctccatgatcgctttgtagtcgtaataatagcggggcgatttcgacaagaggaagatgtgctcgtaagatttcacggggcggtctgttacgctttcgggcaggcaattccgtttgtgccaaataatgtccgaacgcaagtaccaaccactttcccgcaaagcaaacgcgagtagccacgggataccgattaagtccttcggcttgattttatcccacgttttcggcacgtcgtagatacggctgtccttctgataaagctctttgtttttgccgttgcccgcgaccgccatgctcatgggacccttgccgcttcccgcgtagctgtccccgatgttcacccacaacgttccgtcctttgaaagcacgcgccgcacttcctcaaagacgactacaagacgagctatgtattccgcgggcgttttctcgatcccgatttgtccgctttcgccgtagtcccgaagcccgtaatacggcgggctcgttacgcacatattcacgctttcgggcggaagcgtccgcaacacttccgccgcgtcgccgcaataaatttcactcatgccttcttctcgccgttccccgcgcgtaccgttatcacgcgcaccatgtccgcggcaagtatcgccgcgcgcgctttctttttctcggcaagtttatccgcgccctttttgccgttgatactgttttgcttcgatacgtccagttcgcgcttgacgtaaaggaacgctcctttcaagtaatcgtcctttgttataaagggctttccctcgtaggcatacgcgcagagtcctttgataagctcgcccgcctgtttgtccgtaagctctttcaaaagctcatagtacgttttcttgaacctgataattttttccgccaaatgtgttcctccgattttatacttcgtttccccaacaatcccacccacttgcttgttgccgtgcaaataattcgattttcgggatgtccccgaacagctctacgatccgctttctcacctctgccggcttttgactgtgtctttcgatatgcgaaatcaccaccgacgatacgctgtgagatttgcgttccaaaacctttcctctcgttgccaataagcaatactcggcgtttgaacgggtgtaatatcccatacccgtaaagatgccgtcgctctttttgttctgtttgatccatgtgaacgcaaccgttttgtatgtaaatccccatgccggtatcagctcgataccctccgttaagcacggggctgttacccatagaagcaatacgctgttaccgtaccaaaattcttttctttcggcacagcaatttctttgcccgcaatcttcttctcgatcgcctcctgcactttctcgcggtattcgtccttatactgttccggcttgaactcgcccgtcatgctctcgataatcgtctgcgccattttaagctcggaggcgttccccttttcggtcacttccttcgcgggattcttcacgacttcatccgcgaaaaacagcgtgttcaaaagcatctgcccgtccttcgcgcggatcatcacgagcgtttccttcgtgcccaacaccgtttttgcgattgccgcttttcccgactgttccattgccgtaagcaataccgcatacgccttttccgcgcccgttggtacaacgtaatatggcttgtcgtaatatataggatcgacctcggcaatatcgacgaactgctctatcgtgatattcttatctttctttgtttttattttctcgaagtccttttcttcaaaaataacgtactttccgtcctcgtactcaaagccctttacgatatcctcttgtttgacttcccgattttcgcaatcttcgcacgtctttttatagcgcacacggctcatggtctttttatcaatcatgttatatccgatgtcgttctgtttgatgctgttgtgcaacgtaacgggaatatacaccaacccgaaactgatactgcccttataactgtatgccatgataacagtatgggcagaaataaaaataaaaaagcgactattgttgaatagccgccttttttataatatagtcagataacttcaaaatatcgcaaagtatcttttatcgcaattaccattttttcagtcggatgcgctctcggtctttttaattcttctaccgcattaggggcatcgtacatcggcaaacccaaatcgcgtttcacttccgcaatatatgctgtgtgaaccttgaagccgtaattcttttcgatatgatcctgtatcattttgtaggttactttctctttgggcttacgggcttctgcgcgttcctttatcttttttaaggatacctttccttcatcttcgccaaattcaatttctacgtcgatatgacttgtagattttttggaaagcattaccaacgtctcgacgtgcttggtctgagggaacatatcgaaaggctgaatccactctatcgtgtaaaatccgtttaaacccgcttcattttcgatctgcggcgttttttcttctttctcggataaggcatcgagagacgaacattcgtttgttttagacgcgtttaaagccgcgtactcggaattcttgatcagctcgccgtccttttcgacgaggctgcccgtcaaaaggccgagatcacgcgccaaagtagcggggttgcagctgatgatcgcaattttggaaattcccgattctaaaatcgccctgacgacgctgcgcgcgattcccgcccgcggcggatcgagaatcaaacgaatctcctccccctgctctttttccaaaacgccctgcaacttttcctccacgtatccgcagatattcgtcatattggaaagtccgtttttttctttgagggcgtcggcgcatttcaccgcctccgcctctaattcgatgccatagacgcgcttgcaggatttcgccagcatcgccgtcagaagcccgccgcccgagtaggcgtccacaaccacttcgtcccccgtggaaacgacggctttcagcgccgcttcgtacagtttcgcccgcacgttctcgttcacctgtaaaaaggtgacgggtcccgcctcgtaacggattccctgctcttccgcctcgaaatatcccgggccgtgttcgagaatgaactgttccccgaatacgacgttcgtatccttcgcgttgatattcagataaaaggtgaacgtcctgaaaacggtatacaaaagttcgatgagatattgaaggttcggcagattttcggtgacggacacgagcgtgacgatgaattttccgccgatctcccgcacgacgatatgccttaaacttcccgtgcccgcttcctcgtcgtatcccttcaccgcgcattccttcatatagcgatggagcacggcgatgagcttttccgcccattcgggatgaatgacgcaggtggaaacgggaatgatcctatggcttcgttccgcgtaaaatccgatgacgttattgccctcccgatccactccgacgggcatttgcaatttgttgcgatagccgtagggcagatcgctcttgattgcggcagggacgcaaaggcgaatccccgcgatcttgcgcagggcgtccttgacgacgttccctttaaagcgcagctgggaacgataggcgagatgttgcagctgacatcccccgcagcgggtgaagacggggcacttttcgcgcacccgttcctccgcgggcgtgagcacttcctcgatttttccgtacccgattttgtccttgactttgagcacgcgaaatctgattttttcgcccggcaaacaataaggcacgaaaaaagtgactccttcgtgcctgacaatcccttcgccgttactgcccaatgcgtccgttacggcacaaatcatttgatttttttccggcataaatcctcttttccgacctcctcattattttgcttgcgtccgcggcgctctccccgaaacgattttctcccttctgccgcggactttccccttttatatatcggcgcttttctctcccccgcctttgaacgccgagaaagaatgcttttttgaaagccgacgcctttttacggaaatttttagtgctttccgccttaccgaacgacgcgggcattttcccaaactccgctccctgcgcgaaaatttactgcccttttcgacgtttgcgacaggcgctcttttaaagctcttttgccgctttgcaggggataaaaaatcacttttttataatcctttgcaccaagctgttgacggcgatctgacacttggaaaacataatgtcgtagacgaagaaaaagagcgtcccgccgatgaggatcacgggaatgataaatctgttcacgaaatcgaacgaggcgttcatctcgaaaacgaagcgccagacgagatacatggcgccgtcaaaccagatcgccttgatgcccgtcgccagccagcggttgaccttgaatttgagttgcagcgcgttgaggaggggatgaagcccgaaaaacacgatgaacggcagcatatcccaaatgtcgaaccccgtaaagagcaaggcgagcagggaagagccgatataggcgagcacgttgccccaccagcaatttttggaaagcggtatcatcagcgcaaagcacgccaaaagataccccgtaaagagcaaagcgtgagaaagagtccccaccgtcagcgctatcgcggccaaagcgcaggaaacggcggaaagcgcaatctcgtatgcggaaattttcttcatcggtgaaagacggaaaaccgccttacctgcaaccgcagcagaggttgaacagacaattcacgcaaagatacgtatagcagcaggaaatacattgcgtgcaggcgttgccccccatttgttcgttgtcgacgtccacgggcgcgccgttgttcggggcgtacggatcctgctgcgcctgcgccgattgccgcgagtaatcgtttttcgcgttcagctttccgtaagcttcctgatattttttattgccgggatccatctgcatggcgatttccagctgtttcttgctttcattcgaccaatttttcttataaaacaccacggcttgcagatagtgccattccgcgccgcgctcgttgaactcgtcgaggcgagtctgcgcttcggaaagcttgtcgctctttaaaagctccgcaatctcctcgtaggcgctttttccgtccgtatttttcgactgttcgcggcgggcggacataatttccgcatacgcggcgtccagcttgttcagcatccgcgccgcttcgttccccgcctctccgtccagccatctgtcctcgttgtatttctttttgagttcgccgtaacggtttttgatctcttcgtccgtcgcatcctcgttcaagccgagaaggtcataatattccctgttcatgttttaaaaatttttctccttgttccttcccgcccttgcgcgcggaaaacgttgtcaatcggcacccttcgtttctttcggcggagcgtccttgcagcgtttgcacgccgccgaacacatcacccgcttcgtttccgaaggcagtcccctcagtaatatattatccgacaaatcccgattaaaatgaaattttatttttgacaaattttcccgtatatcgaaaaagagggaatgaaagacgaattccacgtccttttgacgccttttcatcaaatcggctttatcctcgcaggaatacgaaaggacgaacggattgtacgcgcctttcttcttatccttatcgtaatcgtctaacgcgtcgatgagatagatccattttccgacggcgtaaaaaagatcgtgcgtgtacggagtctttttgtcctccaataagtaatcgctcagctccgccatcatgttcgccgacgcgtccgccgccctgtccagactgtccgtcttcgatttttccgtttcctgctgcgccgcgagattctccctgacgatgcgctcgatttcgggataattccttaccgtttttttgtgtcccgaaacgaaccaaagccgcttgccccgccccttgtcgccgtccaggatgtcgtcggtgtacttatagtacaccaaggcggtgttgagggcgccgagctttttcgtcatgtcgtccacgttcgccatcattttcgagcggatacagtgcgtaaggcagtgctgtttctctatcttcacgtctatgcccgcgatgttgtgaaggattacggacagaaaagtaacgtcgtaagtaagccccatcctcgcgccctgaccgcacgattgcgcgatccccttgcatacgccgcagtacatagcccgatacaacgtttgatcctttatatataaatatggcgtatccgtacgaatataaccgaacatagactccccgcagcgcttttttacacattttgcggcgcttttataccattataacatgacttttcataaaatgcaaaccgaaaatacctacttcacaataaataacggaatttatcacaagacgaacaaaagaaagaccctttcccggctttttccgcgaaaacgaacctctatcgcggaactccgctttcaaagctccgggaaaaaacgccttccgaaaagcgcgcgtcctcccgcggctttttcctttcgagcggcgagaaaacacagcgcttcgggaaaaatggacggcgaacgcacaaaaaatataaagtttctcgggaaatgtataatgcggcgaacgaattttccaatcgtcgaaaagaaaggatacgtttcacgggaaacgaaagcaatccgttcccctgccgttttccgaaaacggggggttattttttcgactcggggggcacgggagcgatctctccgcccgcaaagcggacgatctccgcgcacattttcttttcgtccgcaggcagcgtctgtttgaagcgaacgggcttatatctcaactccaaaaggcatttgggcggcttcatcgccgttaaaaggttcagccgcttcactcctttaaagctgtctttgacgtcgttgcccgacagcgcgtacaaaacgtcctgcgggaatttgtaggggtttgccgtagaaagcaccacgatgggcgtcgtatctttttcgtcccgtttttcgcggaagaaatttgccgcgtgcatcgccacgcccgtatgcgtatccatcggatacccgtattcctcgaatatctcgtacatcgcttccaccgtatcgtcctcgctggcaaacgccgcgaaaaagtcctcttccagcgccctgtgctccgccgccgtcacttcgtagcaacctttttcggcaagctccttcatgcgctccgccgtcagagcggcgtttctcccgctgacttcaaagaggagccgttcgagattggaggacacgagaatgtccatagacggcgacatggtgcggtaaaacggtcgtttcgcgtcgtagacacccttggcgaaaaattccgcgaggacgcggttgcgattggacgcacagaccagctttcgcacgggcagacccatttttttggcgtaccagcccgccagaatgtccccgaaattgcccgtcggaacggcaaaatccaccgccgcgcccgcctcgatctgatcggaggatacgaggtcgagatacgcggaaaaataataggcgatctgcggcaccaggcgcccgaaattgatggagtttgcgctggaaagccgcacccccttttctttgagttcggcgttgaaggattcggaagcgaacatctttttcacggcgcgctgacaatcgtcgaaattgccccggacgcccgccacaaacacgttgtcgccgtcctgcgtgcacatctgcaaccgctgcattttcgaaacgccctcgtcgggatagaacaccgccacctttgtccccgcgacgtccttaaagccttccagcgccgccttgcccgtatcgccgctcgtcgcggtgagaataagtacgtcctctttgacgcccgtcaaagaacagctctttttgagcagatggggaagcagcgtgagcgccatatccttgaacgcgcaggtggggccgtggaaaagttcgaggatataaagcccctcgtcgattctcacgagcggggcgggatcggcgccctcgaaagaagaatacgccgcggcgcaggcctctttgagaaaatccccgcccaattcgtccagatatttgccgatgatgaacgcggcgcggtcgggatagttcatctccgccatcgcccggaattcctcctgcgtgacggcggggaaagtttcgggaacgaacaagccgccgtctttcgccagcccctgcacgatcgcctctgcgcccgtcactctttcgtttcctcttgtgctgatgaaatacatatattacctcttctattttttcctctttgcgtaaaggcgccgcgcaatcgtcccgcgatgcggcaatccgccggttttcgcccgcacaacttatacgccgccttatatttccttgcctaaaagctttacttttccctctttatcctattccgctttaaaggagcggtccccttctttccaagcaaaccgaaacggcgctttgagagtcctttgcctttccgcccgggcgaaaaagcgaagcgctagccctcccgccttgtagagcggaagccgatgctcgctccacccgtgtccgaagttctcgcgcaaacggggcgcgggagcggctcacgcgcattccatacgaaaaaccggacggaaacgtccgcccggcattcgtcttttccagcgcctgccgtcacgacaggaacaagacgttcaaagatatttctttacgaaatccggaagttcctcttttgcggcggatacggacaccgtaacggtgagtccgttctcctcggcaactttatccagcatatagaagaaacccgccagatcgttgacgttcttgcccgcaatgcgcatcacgccgtcgatgtatacgtactcgttgtcatggttgcccgcgataacgcccttgatgaagccgcaaagcgccgcctcccccgcgacgtcgaaatcgctcacgtcgataaatctcacttcgcgttccaaatcgtacatcccgcgcttggtgtccgtgatgaagatgagatgccctttcgccgtggctaccgccgcgtttgcggcgtcgatcatctgcttggtcttgccggtgcctttggagccgtaaattactttgatcatataaaattcctcccgaatttttttggagtttttgtgttgttccgaaatatttttcggtttattatattctaccaagttttcgagttaatttcaagaccttttacgaaaatttttgtgttttttcgtaaaaatttttttcataagccgtttttccctgccgacgcggatttttcctctccattattgactcgatcgcccttttctattcctctttcgcgttctattcctctttcgcgccccgatttttcgcttgcgccttaaagtcgacaacggcttttcgctttttaaacccgttcacgttttttcgaacgtttgtcgccgtctttgcgcttcccggatacaaacgccgttacaaagcccggaaactttttacttcaactgcgaaacgaaacgctcgatgcggttcaagccctcctcgatgtcctctgaggaaagggaataggaaagccgcaggcagtcgtccgcgccgaaggagatccccggcaccgtcgccaccttttccgcctccaaaagcgcgtccgaaaaggcgatggagccgtcgatttttttgcccttgtacgattttccgtagagatcgccgatcaccagcatgacgtaaaaggcgccgtaaggctccaccgccgaaacgccgtcgatcttttcgatgcgggcgagcattttctcccgcctctcggcaaacacgtccaccatcttctgcacttcttccgcgggggaagcgagcgcctctatcgcggcgtattgggaaatagagcaggcgttggacgtggcgtggctctgaaaggagtctatcgccttggcgacgtccttcggcgcggcgagatagcccacccgccagcccgtcatggcgtacgtcttggaaacgccgttgacggtgacggtgagttccttcattttctccgagcaagccgcgacggagaaaggctttacgccgtcataacagagcttttcgtaaatttcatcggaaagcacgaagatctctttttcctcgcagactttggcgatggcgcgcacttcttcttccgtatataccgcgcccgtgggattggaaggggaattgaagatcagcattttcgtcttaggcgtgatcgccgcggcaagccgggcgggcgtaaacttgaatttgtcctctttcctgcattcgagatacacgggtacgccgccgcagaccttgacgacctccggataggtgagccaatagggagcggggataatcacctcgtccccctcttcgatgagcgcgaaacaggcgttgaaaatggagtgtttggcgccgtcggaaacgatgatttgcgacggatcgtaatcaagaccgttatccttcttaaatttttcgcagatcgccttcctcaaaggcagaagccccgaggagggggtgtatttcgtatagcccttgtcgagagcggccttcgccgcgtcgatgatatttttcggggtgttgaaatccggttcgcccacgccgaaggaaacgaccggctcccccgccgctttcatggctttcgccttcgccgtgatggcgagcgtcaaagaaggagaaatggcggacattctcgatgcgattcttctgttcatatgtagatgctccgtaagttattttttcgattttaacaaggagaaagattccttttttccattgtactccctttttatgaaaaaagcaactccgcaaaaggaaattgtcataaatttttttctttctcttctctccatactcccgtataaacctgacactcgtacgtcaaaatggtgtctaccgtcgtatgcagcgcctgcgcgattttgtaggcgagttcggttttaaaatacgtctgatccgctccgttcaaccattttttcatcgaatccgcgccgattcccactttttttgccaaagcggcgacgtccatgtgacttttccgcattaaaaacgccaccgtttccatatccaccaaatcaaactccaatccttcttcctttttcttctgttgcttcatgatacttctccttaaaaattatttttatagttgtattatat

SEQ ID NO: 4533 - DNA, 13813 bp, Unknown
  16S sequences of unknown bacteria
gaacttcagccttccaagctgactacgtgagttcgattctcatcacctgctccatcgatatttctgttcgaacatcctcgtttggactgaacatatgatcgatccgttttggatcggttttttgtttatccaggaaatggccttgcacctcatcctgcacgcttgatcgatatggaccgaagaaggagctgttgatgaacaggccatgctcggcatctgccgttttgcaccggcatgccgatcacttacgatctgacggaacgctcagctcattcgatatatggatcattcatcattcgcttatcttacctggatgccgaaggaaaaggcatcctccccatgatcatcgcgccgtctgatgcatcgccaaaggcatccgtgttcctcgctgtcaaaaaaacgccgcagaggaatgcgcaaagcgtcaaaaaaaaagatgcttcacgcatcttcagatatgctcgatgacttccacgtccaccttgttgtccgcaggcgaataatcaaaggtgatcttggcaaacgcatccaggttcgtgctcaggatatccgtcaccttttcaaacacacgctcggcatcatccgtgtcattgcagaaatactcgatcttcgtcgtaatatgctttttcgtcttcacactgtctgtcagagcactgacaattccgtttttcttctccattttctcactccttgagctgatttacgtcataatcatagcacctttttcccggcttggaaagagaacgctttccattttcatgaaattcttctattttcttatttacaaatccggattttatggtagaattatttatgcgttgaaacaaaggggtatagtacaatggtagtacgacggtctccaaaaccgtggatgggagttcgatcctctctacccctgccatgacaactgaccggagcgatccggttttttatatcgttcagggccatgtctgcatttgcgcaggcatggccctgtttttcaatagaatcgctgttctgtgcgctcgatgatctcatcctgcagcgctttgctcaaattgcggaaatgatcactgtatccggcgacccggacgatcagatctgcatgctcctgcgggtgcagctgcgcatcgatcagtgtctgtcggtcgatcacattgaattgaatgtggtgcccgtccatattgaaatatgtccggatcagattggccatctgttccagcccttcctctcctttaaggacatctggagcaaacttctgattcagcagcgtcccgccggtctgcagatgatccatcttggccgctgactgaatgaccgccgtcggcccgttcacatctgcccctttctccggggatatgccctcagacaccggcttatgcgcctttcgcccgttcgcgctggccatcatcacctctccgaaatagacatggcatgtcgtcggcagcatattgatgcgatacatcccgcccagcatattgggccgtccgctcaccatgcttcgaaacgatgtgaacaccgccttcatgatctcatccgcataatcgtcgtcattgccatacttcggcgtccggctgcgcacctggttgaggagctcatcatgcccctcgaagtcatcatccagcgcctgcatcagttctcccatcgtgaaccgatgttcgtcatatacgttgtatttgatggaagccagggcatccgtgatcgtaccgatgcccacgccttgcagatatttggtattgtatcgcgcccctccgccgttgtaatccatgccccgggcaatgcagtcattggtcatcaccgataaaaacgggaccggcatctctctggcatagatcttttcgatgatgttgcttcccttgatcttgatgtcgatgaaatgcttcagctgcttgttgaacgcgtcaaataaggcgtcataatccgcaaaatcttccgcgcggcccagtttcaggccaagctgctgtccgctcacctgatcataaccatcattcaaggtcagctccaggatcttgggcagattgaggtatccggtgaggatataggcttcattgccaaatgcccctgtttccacacagccgctggttcctccgcgccgggcatcctccagcgatttccccgcattcagcagctcctgcacgatggcctctgtattgtaaaacgctggttgcccccaccccttgcgggagatctcacaggcacgcttgaggaacttctgcggcgtcttccggctgatctgcacattggagctgggctgcagcagcttcatctcatccatgcagtccaggatcagatagctgacccggttgaccccgtttttcccctccggcgtgatgccgccggtattgatgttggcaaaatcggtatatgtcccgctttccttcagcgtgatgccgaccttgggcggcgcaggctgattgttgaacttgatccacaggcattccagaagctccagcgccttctcatcatcgaggatgcctgcctgcacatcccgctcatagaacggaaacagatgctgatcgagccggcccggactgtaggcatcccatggattcagctcgctggtcacggccagatggacgaaccaatacatctgcagtgcctgccagtatgtctgcgggcgatgcgccggcacgaccgcgcagttctccgcgatctgcagcagctccacacggcgctgcgcatcgccctcctgttcagcgagctcacgcgcatatgcgctgtaacgcgcagccaggatcatcagcgcttcacaggcagtgtacatgccctccagttcttctttgcgctccagcgcatgcggatcctggaagaaatcaagccgatcgatcgcctcctgaatgtcccgctgataatcgaggagccccttttcatagatcttcgatgagcctacggtatggcccggaccgcgctgttccatgaactccgtgaagatcccgcattcatacgccttcttccattccggcgtcatctgccggaagatgcgagaacggatgcagcgctctttccagaatgggatcatgaccttttcctgcaatgccatatcttccggcgtgacctgaaagcggatcagctcccgttcattcatcagacgcatatcttccacgctgtgacagcacagttcaggaaaggtcggcgcaccctgcggggaatcccctttttcaccgacgatcagctctccttcaccaagatacaatgtcttttgagaaaaatagtctttcaatgcctgtgcccgcagctgcggcactgagagcaccccctcttcacggcggtaagtctccgtcatgatcttcgctctctccatatcgatatgcggcggcgtgttcacgctcaacgccctgagctttctgatccgctcattcattcctctttgttccatgaggatcaacctcctattctgatctttggatagcctgcgctgacaaacaaatcaagcagatgcttcgtctcttcctcatccggcgcatgaaaccccgtctcaacgacacggcccagctgccggtatttgcctgtgcctgtgtcatgataaggcaataagtgtattcgtgacacctcgatctgcttatcctgcaagaaacggatgatcttcatcatctctgccgctgtgccgtttacctcgcggatgagcggtatgcgcaggatgatccgtgcgccatcatggctcagccgctccagattatccaagatgagcgcattgtctttgccggtatatcgtgcatgcacgagcggatctgcgctcttgatgtcatacagaaagccatccatataaggcaggatccgctgaaagcgcgcataaggcgcatgaccgcatgtgtcgatcatcacgctgatgcccgcatcatacagccggcgcgtcagctcctccaccatatccatgtccgcgcacatgacctcgccgccagacagcgtgaccccgccgccggactcctcgtaaaacggctgatcctgacaaagcgcgccgaacagcgcatcgagcgtacgctcctgtccagcgatgctgcgcagattcatcacacacgcgtccacacagcttccgcacgccagacagcgcgcatgatccgtatgcggcccggccgcatgcaccggacagactggcgtacagcgctgacagccgctgcacctttcctcatcctgcatcagttcccgttcgaaccgctgggtctctggattatgacaccaggcacaagacagtggacagcccttgaaaaagaccgtcgtccggataccgtccccatcatggatgcaatacttctggatcccggtgatcagcggcatgttcagctcccctttccatctcatggttcaaaaataacagtctgtgcacgcgatgtcaacttcagatccacgaaaaaagcaggcggacctgcttaattcagatatcgatcgatctgttcggcacatgccagaccttcatgaatggcccaaacgaccagggaaggtcctcgcttggcatctccggccgcaaacaatcccttctccgcatcgatcaagtacgtgcctgcttcggtctttgcggtatggcgcgggctcagcggcaaagcaaaggcatcgctgacatacgtctccacgccggtaaagccggctgcgatgatgaccaggtcagccttgcgctggcgcgcgctgccttcgacgacatgcatgccctgcgcatcaaagcgcagatcgaccgtttcgaccgcatgcaatacgccatcttcgcgcaaaaagcgctggatggtcgtctgataaatgcgcggatcgtgtccgaagcgagcgatgctctcttcctgtccatagtccgtcttgaggaccctcggccattgcggccaaggattgcctgcggcgcgttccttgggcagcggcggcatcatctccagctgtgtcacgcccgcacagcccagccggatgcatgagccgacacagtcattgccggtatcgccgccgcctacgacgacgatatggcggtccttgacggccgggatagctttggccgcctgcggatcatccaagcttctggtcagcgcgctcaggaaatctaccgcaaagacgatctgtccgccatcgcgtccctcgcccttcagatcacgcgcggccctggctccgcagcacagtgctacggcatcatattcttcatagagctgtgccggatcgatgtcctttccgacatcgcagcaaagatgaaacacgatcccctcctgcaccatcagcgcgacgcggcgttccacgatctgcttctccagcttcatgttcgggatgccatacatgagcaagccgccagcccgatcatcgcgctcatagacatgcacctcatgtcccatgcggttcaatgcccacgctgcggccagtccgcttgggccgctgccgaccacagctactttcttgccgctgcgcacaggggtcgatggcttcatccggccttctttgaaggccttttcgatgatcgacagctcattctcccggatcgtgaccggatcgccgttcatgccgcagatgcatgccttttcgcaaagcgccgggcagacgcggccggtaaattccggaaacggattggtcgccagcagccgcgcaagcgcatcttcgtcattgccatgatacagctcatcgttccattccgggatgaggttgtgcagcgggcagccgctcaccatgccgcccagcaccatggctgactgacacagcggcaccccgcagttcatgcaccgcgctgcctgttcacgccgctgcgtctcgctgagagaggcatgaaactcatggaaatcacgcagccgctgcgcaggggacagcgccggctgctcctttcgttcatatatcataaatccatctggtctacccatgacttcagcctcctaactctcatacatctgcgcgaacgcacggcgctgcgcttcttcttcatcacagccatcgtgcatgaaacgctcgatattctccgtcatgacacgataatcgtgcgggatgatcttgcggaaaagcggcagcttttccatgaattgttcaagcacttcactgcccttttccgaatgagtcacccggacatagtcagtgaggatctccttgagccgtgcgatatcgcggggatcatcgacatcttcgatctccaccagatcacggttgacccgcagatacaagtcatggtcctcatcaaggatatatgcgacaccgccgctcatgccggccgccacattgcgcccggtgcggcccaggatgacgacgcagccgccggtcatatattccagcgcatggtcgccgcaaccctctacgaccgcagtggcgccggagttgcgcaccgcgaagcgctctccggcctggccgcatacataagcggtgcctgaggtagcgccatacagcgcgacattgccgatgatgatgttatcctgcgcgcggaatggcgctttcggcgaaggatgcacgaccagacggccgccggaaagccccttgccgaagtaatcattggcatcgccttccagctccagcgagatgccggccggcacgaaggcgccgtaagactggccgccgctgccgatggggcggatgcggcaggcatcatccggcaaaacgccatagcgcgaagtcacatgcgaaccaagcagcgtgccgaatgagcggtcggtgttgtgcaccggcagttcacagacaaagggcgcatcgtgcttcatcgcttcatccaggccggggatcagcttggcggcatcgatcgtctgctccagatggaagtcatagacatcggccggatcaaagcgcactttgccgcctttgacgggctcaagcaattgctgcagctgcagatgatagacatgctcagcgtgctcgctcaccttgagcaggtctttgcggccgatcaattcatcgaccgtgcgcacgcccagcgatgccatgatctcccgcagctcctgcgccacgaagcgcatgaagtggatgacatgttccggcttgcctttgaagcggcggcgcaggcattcattctgcgtggcgatgccgaccggacaagtatccaggttgcacacgcgcatcatcatgcagcccatggcgaccagcggtcctgtggcaaagccgaactcttcagcgcccagcatggcggcgatcgcaacatcgcggccgctcatcagcttgccgtcggtctccaggcgcacccggctgcgcagatggttttccaccagttctttctgggtttgggccagaccgatctcccatggcataccggcatgatggatggagctctgcggcgcggcgccggtaccgccgtcatagccagagatcaggatgacctgcgcgccggccttggctacgccgcaggccacggtgcccacgccatgctccgcaaccagcttgaccgacatgcgcgccttgggattggcgttcttcaggtcatagatcagctgcgccagatcttcgatcgaataaatgtcatgatggggcggcggcgagatcagcgtcacgcccggcgtagagtgccgcgtcttggcgatccaggggtataccttgcgccctggcagatgtccgccttctcccggctttgcgccctgcgccatcttgatctggatctcatcggcgctgcataagtattcgctcgtcacaccgaagcggccgctggccacctgcttgatggcgctgttgcgcgcggtgcccaaacgctgcgggcgctccccgccctcaccgctgttggacttgccatgcagcgcattcatcgccagcgccagcgtcgtatgcgcctcttcactgatcgagccataagacatggcgccggtcttgaagcgcgtcacgatcgcctctatcggctccacttcatccagcgggatcggcgtcacctgagaacggtcaaattccagcgcgctgcgcacggtgaacatcgcatgctcgccatgcagcatcgccgtatatgtcttgaatttctcatagtcgttttcccgcacggcttcttgcagcgtcgtgatcgtcagcggatcgtacagatgccgctccttgtcctcaccgcttctcagcctgtggaagccggtcgtcaccagcgccggcccgcgtttggccagtgcctgggcatgatgccagcggatgtccgcatcgatcttggcaaaggccaggccgcctaaagaggccggggtatcgccaaaggagcggtccatgacctgttgatcgatgccgaccgcttcaaagatacgggccgactgatacgactggatcgtcgagatgcccatcttggcggcgatcttcacgatgccatgcaagatggcgtcattgtaatcacgcacggccgcatgcggctctttgtccaacacatcgctgttcaccatgtcacggatgcactcatgcgccagataaggatagatggcagatgcgccaaagcccagcagcagcgcgaactgatgcacatctcgaggctcgccgctctccagtacgatggagactgcggtcttgcggcggatacgcaccagatgctgtgaaagcgtggcgaccgcgagcagcgaagggatgatcagatgctgctcatccgcggcgcggtcgctcaccagcagcagattggcctgtgcgtcacaagctgcatcacagtctttctccagctgatccagcgcctgttcgatcgacatcgacggatcatacagcagcgagatctccgcggtcttgaactgcggatgcacgagcgtgcgcagcttatccatatcgcggccatccaggatcgggttgtggatctccagcacccggcagccctctgcgctttccgcgagcagattgccctgcgcgcccaggtaaacagctgtgtcggtcacgatcttctcacgcagcgaatcgatcggcggattggttacctgagcaaacagctgcttgaaataatgaaacagcagcggatgacaggaagagagcaccgccagcgggatgtccgtgcccatggacgccgtcggttcgataccgttcttggccatcggcaggatctgatcgcgcacatcctcatacgtataggcaaagctgcggtacaggaaatcgcggtgttccggggcaaagacatatggcttgcgctcctgggccggcagatccttcagctggatgagcgaacggtccagccattcgccatacggatgctcatccgccatgctcagcttgcattcttcatcgcggatgagccgatgcacggcggtatcgatcaccagcagctcgccgggacgaagccggtccttgcggatgatatgctcttctgcgatcggcagcacaccggtctcggaagacaggatgacatgaccgtcgtctgtctgccaccagcgcagcgggcgcagcccgttgcggtcaagcgccgcgcccagcttgacgccgtcgctgaacagcaccgcggccgggccatcccatggctccatcagcgtcgcgtgataatgatagaagtccttcagcttgcgcggcagagaggcatgctgccatggatgcgggatgagcgtggccaccgccttctcgatcggcatgccgttgagatataaaaattccaacgtattgtccagcatggctgaatccgaaccttgggcattgacgatcggcagcacatcctcatgattctcgcgcaagaacggtgaatcccagaccgactcacgcgcctgcatgcggccgcggttgccgcggatcgtgttgatctcgccattgtgcgcgatcatgcggttaggatgcgcccgcttccagctgggctgtgtgttcgtggaaaaacgcgaatgcaccatggctaaggcgctctcatagcgctcatcctgcagatccgcgtaaaacgcgcgcaattgtccgaccagcagcatccctttatagacgatggtcgaggcagacatcgagacgacatacgcatccgggcagcgccgttcaaaacggcggcgcagcagatataagaagcgctcaaaggccagtccgcgcgcgatgtgcgcggggcgcgtgatgaagcattgccagatggccggcatgctggccaaggcatggggatgcagcagctcctcatgcaccttcaccttgcgccagaacgccaggtctgcaccggcatcgctgacgatcgtttccatcgcctggcgctgcgcttgctcatcttcgctcaaaaacagcatggcgacgccataatcgccggccgcaggcagttcagatccttcctcatgcgccgcagcggcgaagaaacgatgcgggatctgtgtcaagatgcccacaccgtctccgatctcgccgctggcgtctttgccggcgcgatgttccagctgttcgacgatggtcagtgcctgctccaccagcacatgctcacgctctccgtccatgcggacgatcgcgccgatgccgcaggcatcctgctccatctgttcctttcgcttatcttcattttgattcatgatctgaactcctttctaacagccgctgctgccgtaattggacagcacgcgggcgctcgggtcatcgacatcacagccttcccagctgcgattcggcatccagaaatcacgcaccatctgtgactgtcccggataaaatgactcaaagatctcccggtataacagcgactctttggtaaatggggccgcatgcgcataccggcgccgtttcgtctccaattccgcatcgctgtacagcgactcggcatatgcctgcagatcatcccgcagtgaatggccgaccgcatcggaaaacgcggccttctcgcgcatcaggatatcctgcgggagataatcgcccgcaaacgcatggcgcagcagatatttgcctttgccataatgattcatcttcaggtttggatcgatgtgcagcacatagtccgcaaaagcgaggtcgccgaaggggacgcgcgcttccatggaatgcacgctgatgcagcggtcggcccgcaatacatcatacatatgcagctcccggatgcgcttctcgctctcttcctgaaacgcctttgcatcaggcgcgaaatcggtgtatttatagccgaacagctcatcggagatctcaccggtcatcagcacgcggatatccgtcgtctcatggatggccttgcagatgagatacatgcccatcgaagcgcggatggtcgtgatgtcataagtgcccaaagcgtagatgacatccttcagcgcgccgatcacttcctcgcgggtcatgaggatctcggtatgatccgtatgcaggtattccgccacttcccgcgcatagcgcagatcgatcgcgtctttatccatgccgattgcaaacgtgcggatcggccgcttcagcatgcgcgcgctgatggcgcacaccagcgaggaatccagtccgccgctgagcagaaagccaaggggcgcatcggcgtccagacgcttgcgcaccccttcgcataacagttcgcggatcttcgtgcaggcggtttccagatcatcgctgctatagctgctcaccttgctcaagtcgcggtaacagtgaaagctgccgtctttatagtaatgtccgggaggaaaaggcatgatcttctcacagatgccgacgaggttcttcggttcgctcgccatcaccatgacgccggattcatccagaccgtaatacagcgggcggatgccgatgggatcacgggcagcgataaaagaaccgctttgcgcatcatagaggatgagggcgtattccgcgtcaagcatggcgaacatatcgatcccatagcgctcgtacaacggcagaaggatctcacagtcgctgtcgctgacaaactgaatgccgcttgcttccagctgttcgcgcagcgaacggaacccatagatctccccgttgcagacgagcatgctgccattgcggacaaacggctgcatgccgctgtcgctgagccccatgatggcgagccggtgaaagccgagcaggccgtttccggtatccaggatgcgcgtgtcatccggtccgcgcgagatggtcgcggaaaacccttgatcaaagcgcgcgcggtcagccccagcgctgaaatatcccatgatcgaacacattgccattcccccttatctgatcatcgatgattattgaatgccaaacagcagcttgccataggtcgggaacggccagtactgcggcgaggtcatcgtctccagcgcgtcgcaggccgtgcggacctcatccatcagcggcagcacctcatcgcggtaacagaatgccgcgctctccacatccagcttctctgccttctgtaccacacgcttcagcttttcgctggctgcgaacgccgcttcctgcaagtctgaagccagcgcggccgacttgctctcatagcagctcttcacatcgagcagctgctgcttcatcgccgcagtatccagccactcatgcacctgcgcagtgacggccggcaggatctgcttcttcaccatgtccagcatcgtcagcgcctcgatatgcagcgtcttgccatactcttccatgaagatctcatagcgggaacgcacttcttcttcatcgaagatccgatgacgcttgaacagctcaatgttctcctgacggatgaaatatggcagcgcgtccggcgtcgtgcgcaggttgagcaggccgcgcttttcggcctcttcgatccaggcatcgtcatagccattgccattgaagatgatgcgcttatggctgcggatggtatcctggatcagcacatgcaatgcgctgggcagatccggcgccacttccagcacatcggcgaactgcttcagctcatcggccacgacggcgttgagcacgatgttgcagccggcgatcgatgcgctgctgcccggcatgcggaactcaaacttattgcccgtgaacgcaaagggcgaagtgcggttgcggtccgtcgtgtctttctgaaacttcggcaagacatgtgccccgatcttcatgacctctttggccttgccatcatacggacggtcctgctcgatggcctccaggatctccgtgagctcatcgcccaagaacatggagatgatagccggcggcgcctcattggcgcccagacgatgatcgtttccagccgttgccacgctgagacggagcagatcctgatgctcatcgaccgccttgatgaccgcacacaggaacaataagaactgcgcgttctcatgcggcgtttctcccggctccagcaagttcacgccagtgtctgtggaaatggaccagttgttgtgtttgccgctgccgttgatgccttcaaacggtttctcatgcagcagcgccaccatgccatgcttcttggcgatacgctggatcagctccatcatcagctggttgtgatcggtggcgatgttggtcgtcgtgaacaccggcgccagctcatgctgagccggagcgacctcattgtgctcggtcttggcgctgacccccagcttccacaattcttcattcagctcattcatgaatgcctgcacacgcgtcttgatcgtgccgaaataatgatcttccatctcctgccctttcggagaaggcgcgccaaacagcgtgcgcccggtgtagatcaggtctttgcgctgctcataataggtcttgtctaccaggaaatactcctgctcgcagccgacggtcgtgcgcaaggtatgcacatcttcgttgccaaacagtttcaggatgcgcaggccctggcggttgatggcctccatgctgcgcagcagcggcgtcttcttgtccagcgcatggccggaataagaacagaatgccgtcgggatgcagagcacattgttcttgataaacgcataagaagtcgggtcccaggccgtatagccgcgggcctcaaacgtcgcgcgcagaccgccattcgggaaagaagacgcgtccggttcaccacggaccagttctttgccggaaaactccatcatgaccttgccatgaccatccggtacgatgaagctgtcgtgtttttctgccgttacgccggtcaacggctggaaccagtgcgtgaagt

SEQ ID NO: 4534 - DNA, 1985 bp, Unknown
  16S sequences of unknown bacteria
acccaaggggtgggtccttagggcgggagcccccgccctaagcggcgtctttctttccatattctttcttcgccggagaaaaaagaatatggcccccggagggcgttagcaggattgtctggtaaatattaagacgtagcagcttccggccctgaagggcgcatgcccgcgtctggtagaaattaaaccgtaagggcccccctgccccggcgggcaggcccccgtgccccggcgggcaggcccccctgccccggcgggcgcgggagaaaaaacaggccgtgtatcttttgtgatacacggccttttgcttttgcgttttcaaataccggaacgcaggaaataccggaacgcaggcgcagcggaagaaatcagtgcgccagcttttccaggcgctgggcggattcgcacagttgggacaaaagggcgcgggccttttcggccttggcgcgctcggcttcgacgacctgggcgggggcgcgggcggtgaatttctcgttttgaagcttggcttccgtgcgcttcagctcgtcctctgccttggcgcgctccttggcgatgcgctggagctcctttgcgatatcgaccaggtcctgcatgggcataaacatagtggcgtcgtgggtcaggcaggagaccatttcggcggcgccttccggctctttgtctgtgacaaggatcgtttcggcaaaggccaggcggcagagctgggcttgggcggcccggaatatttcctgcttcgccgtcacgatatacagcgtgcccttgcgggacggcgggacgttcatctcgctgcggcggttgcgcacggcgcggatggcctgcatgacggactccatggcgtcggcctcggcttggaagcagaggtccgcgcggtatgcgggccactgggcgcagatcagggtctcgccctcgtgggggatggcctgccagatctcttccgtgataaacggcatgaacgggtgcagcaggcggaggaattggtccaggacatagaccaggacctgctgggcggtgcgcttggaggcttcgttctcgccatagaggcgggattttgtcagctcaatgtaccagtcgcagtaggtatcccagatgaaatcgtaaagcttcgcggcggcgacgcccagctcgtagcggtcgagattttcggtgacgtcgccaattaaatcgttcagcttcgtcaggatccacttgtcctcctgctcgagtctatcggcatccggcaagcggttttccgtgatctgcaggttcatcatgacatagcggctggcgttccagatcttattggcaaaattccgcatggcttcgcagtttttgacgtagaagcgcatgtcgttgccggggctgttgccggtgatgaggttgaagcgcagggcgtcggcgccgtaggtctcggccatctccagcgggtcgatgccgttgccgagggatttggacattttgcggccctggtcgtcgcggaccaggccgtggataaagacggtgtggaagggcgcctgcttcatctgctccatgccggagaagatcatccgggcgacccagaagaagatgatatcatagcccgtgaccataacggaggtcgggtaccaataggcaaggtccggggaggctttgtccggccagccgagcgtcgagaagggccagagggcggaggagaaccaggtatcaaggacatcctcttcccttgtgatattctggctcccgcaggcggcgcagcaggtcgggtcctggcggtcgacggtgatgtggccgcagtcggcgcaggtccaggcggggatctggtggccccaccagagctggcgggagatgcaccagtcgtggacgttctccatccagttgaggtacgtcttggtgaagcgctcggggacgaactggatcgtcccgtccttgacgacgcggatggcttccttggccaggggggccattttgacgaaccactgggccgagatcagggtctcgacgtcgttgtggcagcggtagcaggtacc

SEQ ID NO: 4535 - DNA, 24026 bp, Unknown
  16S sequences of unknown bacteria
cgtcacagtgccgggcgtcaccctcaaagcggcggcttatatcctccggacacctcacgcacataccgcccgaacagcacattctgtcaacatacgtatccccgtcaccctcgctcccgcgaaagccgtacacgctgactgtaaagcgctccgaaagccttcccgcggcggcgagcgagcgcaggtcccctccgataacggcgagctttatttcctttgtctctctgtccatatccttcaccctttcagtctgaaaagcgtttcaccgcattgtcagtctatgccgcgggcgcgcgtcctgcgcttcacacacgcctgtataaaagacacacgctcaggtattcacaaaaattatgcgttttgcggcttgataattgctctccgatgtggtataattttattatctcattttcagggagggacactgatggacgctgtccgcggcgtttgcgcctttatactcgacaacccgatatggttctttatacccctcgctcttctgaatctgctctccttctcgctctacgggattgacaagctgagggctaagcgcgggatgtggaggataccggaagccacgcttctctggtcagccgcgctcttcggggcgaccggcgcttttctcgggatgagcctcttcaggcataagacaaagcacgcggtgttcatcgtcgtcgtgacgctttcgcttgtcgctcaggcgcttgtctgcgccggggttatcttcttcggtctctgacgcttgattctacgcacagtccgggcggccgggctttcacttgtttttattttgggaaaggaagtaaatcatgggaggattattcggcgcggtctcggattcgagctgcgtttttgatctgttcttcgggaccgactatcactcgcacctcggcacgcgccgcggcggtctcgtcgtttacggggacggagggttccagcgctcaatacacaatatcgaaaactcacccttccgcacaaaattcgagcgggacatcgaggaaatggagggctggtcaggcatcggctgcatctcggacagcgagcctcagccccttatcgtgaaatcccacctcggaaagttcgcgataacaactgtcggacgcatcaacaactcagacgcgctcgtaaagctctgcttcgacaagggctacacgcacttcctcgaactctcaagcgacaacgttaaccagaccgagctcgtcgcgtcgctcatctgtatgaaggactccatccccgagggcatcaaatacgccgagacgcttatcgacggttcaatgtccatgctcatcctgacaagcgagggactttacgccgcgcgcgacaggctcgggcgtacgcctatcgtcatcgggcacaaggacggggctttctgcgcgtcgttcgagagcttcgcgttcctgaacctcggatacacaacctataaggagctcggtccgtccgagatcgtcttcctgacgcacgactcctgtaaaaccgtatgtcccgctaccgaggacatgaagatctgcaccttcctgtgggtttactacggctatccgacatcttattatgaaggcgtaaatgtcgaggagatgcgctacagatgcggtgagatgctcgccggacgcgacgggatgaaagccggggacgccgatattgtcgccggggttcctgactcgggaacagcgcacgccgtcggttacgcgaacaaatccggaatacccttcgcccgcccgttcatcaagtacaccccgacatggccgcgctccttcatgccgactcaccagtcaaagcgaaacctcatcgcgaaaatgaagctcataccgatcgacgccctcatccgcggcaagaagctcctgctcatcgacgactcgatagtccgcggcacccagctccgtgaaacgaccgaattcctctaccagtcgggcgcgaaggaagtacatatccgccccgcctgcccgcctatcctcttcggatgccggtacctcaacttctcgcgttcaacaagcgagctcgacctgatagcgcgccgggtgatcaaccgcctcgagggctccgacaatgtcccggacgaaagaatctccgtctacgccgacccgacgactcccgaatacgagagaatgatagaagagataagaaaagacctgaacttcacgtcgctcaggtatcaccggctcgacgacctgctcgagtctgtcggcataccgaaggaaaagctctgcacctactgctgggacgggagagaataagcgaaaacgacataagaaagggactgccgtgaaaaccatggcagtcctttgtctcacccgatgcacgaaaatatataaatgcacgaaaatccggtcagggtgtccccctttgtatatttaagattttgttcacattctcacgctgactgcaccgggtttatcggcgtcgccatgccggggcgcattcccctgaagccgcggaccagcttgtattgatagcggacgtttccgtatgtcatcccgtactcgtggcaatgagcgcggagatagccgatcacctgacgcttgcccaccggctcaatcgcgttgtcgtcgcaccagcacttatagatgttgtagaactctctcgaggttatctcgccttccggatcgaaggtgaacgagcccttcgagcgaagaaaactcacgacgttattcgcctcgtccatagccgacattatcgccgccttcgacctgtcgctgaccgtgaaatggaagtcccgcttcatcagcctgtacagaccgtcgagcgcccagaccacaatctgttccttctcagctctcagcttgtccgacaggaagggatcatcctttctgtccttcggtctcggctttgtcatgagaatcagctgacgccggaagaaaccgtagctgtcgtcgttcgccgacttcaggaacccgttgctgaaagccatcagacggcagtacatcagaccctgatacgactgaacgcctttcctctcgagatccatcggaccctcagccgtgatgagagtcttcaggttattcgtcgtcggaaggttctccatcctcatatcgtcgtcgaccatcagaagcttatgctcgaggtcagctctcgcgaaggaatttgtctcaagcttcgggatgcttccgtagttcatgttgtcgccgaggatagcgcgcataaccacgccgatcctcgatttcccctcgccgccgttgccgatcataatgagcatcttctgcgctctcgtcgaaggtatcaggcaataccccatgaactcctgcaaagtcttcacgtcctccggctcgagaagctcattcacgaacctcatccaatgctccggagccttcgcggtgacgcctgtgtaatccaccggaagcctgttacggcagaacagcttctcatccgtcttcaggcaggtcgaggcgttatacgtaccgttcgcgaaatgaatgagattatcgtccacaagcagctccttcgactttgcctcaatcttcaggttctcgacgatatttcccgccgtctgagccggaaagctcctgacacaatccttaatcaagccataaatctccgccttgatatcctcagtctgacaatacccatccggcgtaaagaacgtcccgttaatacagcggatatcatgccccttcagatactcccgacaaaaagcagtagtatccagcttcttcccattccaccaagccggcgccgccgccggcgagccgccggtggcatagtcaaggtttctctctgcgccggatgaagtttgtgcctcatcaaacatagtgcgtcgggaaaggttcttcttcacagccggtcttccagtgctgactttcggtctgccaagattcgggtcaggctgagacttcacgaacgcctcgcgtttctccttgtcctcgtcgcccattgtgtatgcgacctccggctcagccgtgtaccaatcgtccgatgggttgaaagtcttgcccgatgaagcttgtttctcatctgacacagcgcgtccggaagctgaattctgtccggctctcacgaacgcctcgcgcttctccttgtcgaggattcctcccggcttctcgtcgtcgaacatggacgcgacgtccggcgccgttgtctgccactgcctggctggctcctcgaaaatcacgccgtcctcctccggcgggatgtaatcctcgaactcgtaagtcaccggtatgtcttttctcagctcagccattctcctcatcctccttcccagccccagcggcttcaacagccttctcgatatccccgcgatacctcgcgagcttcccgaagtaagcgagcccggctctgacaagcttcgccttctccctgtcgtcggtcactccccagaaggactcgcggatgtggtcgaggtagtcgagatgagaagccgccgccatgtagaggctgacgtttccgccgtccgcgtgggttctcgggtcaaaccgctccatgagagtcctgaagcccgccgcccatttatcgaactccttccagaatctgtcagtgtcgcggcggaactgcgccgagcgctcatagcggacgccggcgaacggcttcaccccgttctcaggtatcggcgctaccccgaagtcaacggcgagcctctccatcgcgccggcgaaatcaagccccgtgagcttcatcgcgagcgatatcacgtcgccgctctcctgacagccgaagcagtagtagtggtcgcgatagaccttgaacgacggcgtcttctccccatgaaacgggcagagcgccatgtcggagcggttcagcttcagcccgtagagcttagcggcttccctcgtatcgacattctcgcggatgactgttgttgttatgcgtttcatataaaaccccttccgagctcagacataattttgagctgttcagcctttctgaactctgtgagtatattatagcataacagaacgtgtcaccgcttgtcagggtgtatcaaaaagtgtcgccgttttcaacaaagtcatggattatatcatactatattttatgaatgcaatacattcccgtacaaactgtcgcgatatatgacgggattgcggatatgaacaaaaaatgaaatatacaagggggacatccggaccgaaatctcgtgcataaatgcatggagcgccttcaccatctcctctctcccggcatatcctgataaaaaaccggaaagggatgatatcatgagtctgataacctacccttacaaccgctcccgaaccgtcgcctacgcgagacgatgggcgctgtcgcggaatccgctcttccatgatttcaccggaggcggcgggaactgcacgaattttgtctcacagtgtcttctcgcggggtgctgtcagatgaacttcactgacacgttcggctggtactatctgtcggttgacgaccgcgcggcggcttggactggtgtcgagttcttctataacttcatgaccgggaacaatgaatccccgataggcgacggttcgggaccattcgcggaggagaccggcggaaacctcttacccggcgacgtgatacagctggggcgcgaggagggcgacttctaccacacgctcatagtcaccggacgcgaccggcgcggctacctcgtctcggcgcacaccgacaacgcgctcgacagacctctgaacagctataatttcaggcgtatacgcttccttcacatagacggataccgcgcgccggaaggacacgcggacgattgctttgagacgctgatgagaggataacggcaagaaaaaagggaccgcttatcacagccccttatatttatccttttcagacgcccttctgctttctgtagtccccgacgaactgcgcgatgaattccgccgttccgtcgatgccgagcttgctcgagtcgaccgtgagatcgaagttctcgaggcgtccccacttctgaccggtgtagtagttgtagtagtttgagcgtctcttgtcggtcttgacggcgagctcctttgccttgtcgagggagacgttgtgtctctcggctatatgtcccgcccgcacctcgagcggcgcctgaatgaacactctcagaaggttcgggtatcctctcagcacataatccgagcatctgccgataaacaccgccggagactcatccgcgagagacttgatgatctcggactgggtgacgaacagcttgtcgtttatcggcatatcgaacgccactcccgcgttgccgttgaagaaggaggagcccatcgcgagggtgtaaagaagactgttcgtcgccttctcgtccgcttcgccgatgacgttgtgcgccatgccgctcttctttgcggcgagggtgatgagttcgttgttgtagaaaccgatgccgagactgtgcgcgagcttctcgcctatctcgcgtccgccgcttccgtactgtctgcctatggttatgataaggtttgaattcataagactacctccgttttgtgttcggcgccattcgacacctttgcttctgtatatattatacatccttccggagtgcgcagtcaagcggattttgtaaattttacatgatttatgactgattatttgtgccgtccccgtcgaacacagtctcgatgacccgcggacagcaatcgggggagtagcgccagcggcttatatggagcgcgtcggcgaggtttgcgggtgaatcggtgtccggtgtgtcagcgctgtccgtatcgtccgtttccgcgctttcagcctgctgtgggacagacgggaagcaccccgcgaaagcctgacgcttcggtgaaatgcccttgtacgggtcgacgataacgagctttatcttcatcttttctgggacgatgctctttatgtaaacagccgccgtctgagagacagatacgtcgtcccgccactccgcgagcccggcgaggttgggcgtcagctcgacgaagataccgtagctctcgattgacctcacaatcccggtgacagtctgtccgactctgaacagcgcggcgttttcctcccatgtgccgaggagctcgcgccgcgtcacatatatgcgccttgtcattccgttctcacgctcgacagatttcacgcatacgggcatcatacacccgaccctgagccgttcggcgggatgatcaatcctcgacacagaaacgcagtcgataggcagaagcgacgccacgccgcagccgatgtccacaaacgcgccgaaatgctcgaggtgagtgacctttgcggcgatgatatcccccggcgtcagacccgagaggtagttcacgacgcattcgcgctgagcgagccgccttgacagttttataaccggcgtcccgccccgttcggtcactgacagtacgcggaagcagaccggctttccgactcttgttatgatggcgatgtccttgacaggttcgccctgggtgaatacagcctcgtcgcgctcgattgtgccggtgaactttccgacctcgaccgtcagagtcagatcgcccgaacagcgcactgcgacgccctcgaggattcttccttcccgcatagcctttttcagtccgtcgagagatgatgtgtaagcgcgggtttctgtgtcgcggatgagctctccctccggcagatatgaagttccgatcattgtgtaacccttcctttcgatgtgtccctgagttttgtttacacgggaattctattcggcgggcgagggatttattccggcggaaaaagttcacggttattcacgaatcatattgacagatgggaacaatcgtggtataatagggatatacaaaaagagaggtgtgagggaaaatgttcatagaggagagacaccgcgagatactgaaaaggctgaacgcgagcggcacgataacgaccgcggagatacagcgcctgttcggaataggctacgacagcgcgaaaagagacctcagaatactcgaggaaaagggactgctgaaacgcacgcacggcggcgcgatctcgctctcggcgccggagagaaaagagacgctgaggattgtgaaggacgagcgcccggatatcgtctcaatcgcgaggtacgcggtttcgcttataaagccggatgaggtggtttttctcccggcgtcgcctgtgggtttgcagatggtgcggggactgccggacgggctgtcggtcagggtcgtgacgaattcgctcgcgcttgccgaggaagcgagacagagacaggggacaaaggtattcatgattggtggagagcttgacgacaggggctgcgcgacggacagcttcgcgacagagacaatcaggcggataaggatggcgaagagcttcataacgacggcgggcgtctcggcgggtttcgggctctcggtgcagaagagtgtgagcgtggcgttctggaacgcggttataggctcgtcgtcggctgtgatagggctttatccgtccgagcgtttcggtgttgattcggtgttttcggtctgcggggcgcagaggctgaactgtgtgataacagacggcagggcggacacctcgaggatatccgagttcgcggagtcgggagtgaaggtcatagtggcggacaatcaggagtgacttatcatttaaggctttcgcggagataagcttttgttttgtcgtcaatacgatagctctcgacagatttgcgcacagccatgcgcctgacggtatctctcagtctgccgcgctcagacaggtacggcagaatatcatcgtgattataagcgagcgccgtggcgaagtaccaagccgcgcccatgtcgagatagtagtcggctctcgggaatctctcgttatcctccgtgcagacaagtgaagcgacagtatccggcatccatctttcaagcctgtcgccgagaaagaacttcatcagcatattgacggcgaagcgcacggtgtaaaccatgtccgccggaacaggagacgagctgtaagggataagcgtatcatagcagaagtcatgaatcggctgtaaatcctttttgaagcaggacggtgagagaatgtcgcaggtagcccagttgtctgcatacggcaggaacttttcgagttccgccattacctgacacacgtcgcgcataccggagataatcacggagtggagctggtcttcgtcatagaatctgtgcggcaggtcgttcagaaaggcgcggcagtcgtctggttccgacatgatttccttcgcgagcgcccttacagcgggagttctgacaccgaggacgcgttcgggttttacggtcggtatgagcttcatgtgaaagcttctgaattcagggtcggcgagagatgcgaggcgggtctgtatgtctgtcattttctgtctccttttatcgatatattgatattataccacaaacaacgcgtcaagtcaagcaaaggggtgaatagcgtgaaatacgagataacgcggcttttcggagccgggagggtgacgccggagccggacggctggagcttcatcgacacgccggagacctgccggatatactatgtccattcgggaaacgcatatttcttccgcggcggcgagaggatacccctgacggcggggcatatgtatttcattcccccgagactgccgtttgccgccgagcaggacataagctcgccgatggatcacacgttcttcgatttcagtatgcgcccgcaggttgtgtcggaggagataatcgcgcttgacggtgagagttaccctgagctcggactgcttgtccgcgcggctgagaggatgatcggcagggacattccttacggcacttcggaatacacaccgctgatcggctgtatcgagactatggtcaacgtcatatcgggcttgaatgagcttaaaacggtggacgacccgacgatactgtcggcgctcgacataattgagtcagaatacacgaacggcatcaccgtgacagatgtagcgctgagactcggctatgacacggaccactttataaagaagttccgcaaagcgatgggcacgacgccgtacgcgtatataaaggcgctgaagctgcacgaggcggaaatgttacggcggaacggcttcacaatggcacaggcggctgagcgaacaggttactcgaccccggagtcgctgtatcacgccgcgcacaggaagaagaagtagatcacgataattacgtttgtctcttgattattcccgtgcgatatgatataattatacatgaaaacaagaaaggcagagcgggcacgcgcccgacagaacaggattatggatgagaaagatatatgtgtgagcgggaaatcggtttcctttacgctcccgccgtgtgagccgcgcggatttgagccgggcgcgcgctggctgacgatgaatactgagagatacccggagttcgcggaggttccggcgacattctttgtgagctgtgagaggcgtttcttcgcggcggagttcgcgaaaaccgtagtggttccgcacggtaagtcgcctgtcgcgcatatctgcgtcttcggagacacgaaataccgcctgagcgtgaacggcaatgttctcggtgtgggtccggcagccgctggcggcgattacgcgaacacaaagccaatgccgaagcagtactatgaccggtacgatctcgcgctcacagacgaaaacccggatgaaagcaaagggatagccctcgatatcctcgcggaggtgcagacgcccggcatcgtgcagaccgactattcccgcggcaggggcggctttatattctcctgcgccgtgacatacgaggacagggagccgttcgtcatagtatctgacgcaagctggcacgcccggagaaacacgcgttacacagagtgtcatatctgcgacctgacgcgtccgctcccgaagtgggagaagccggagacaatcacggacaagagggcgccgtggaacctgacgttcgccgacataccgatgccggagcgcgagacgatagtcccggtccgcactgacgtgacagacaatataggcgagcgagtcacccgttccgggtttgaccgcatctattcggcgtatgtcacggtgagggtcgataaccgctctggcaagcccgccgggataaaagtagtatccgccgagtattcgccgtcgccggaattaaatcacacattttacataaccgtcccgaccggagagagcgtttatacggatctcgtgatgcgcagtgtaggtgaggtggtcgcggtttccccggaggacgtcagcgtcgatataagccttatatatcagcactacccggttgaccgtaagaacacaggcgtttttgaatgttcggacgacaagctgacaaatatctggcggctggggcgtgacacgctcgagatgtgccggcagacgctgcatcttgacagcccgctgcatcaggagacgctcgggtgcgtcggggactatatgatcgagagcgtgatgactcacgcgacgttcggggatatgcggctgacaaggcttgatctcatgcgcatttcggactatatccggatgaacgggggcgtgatgttccacacggcgtacagtctgcttttcccgacaatgctgcttgattattacaggttcaccggggacacgcggacggtgatggagcttcttccgaccgtggatacgcttttcgcgcggttcaggacttatatgaagggcggggtgatatcctgtccgccggattatatgttcatcgactgggcgcggattgacggcttcaatcttcaccatccgccgatggcgctcggtcagacggcgctgaacgcgttttatcagagggcgctcacggacgccgcggagctgtacagtgtttcgggagacgggaaaaaagccgcggtctgtgagaagaaggcgaaccgacacagaaagaactgccgcgtgagattctacaacaggtatttaggggtgtacggcgacggcgggagcgcaccggagtatgtctatcctccgaccacgtggcttccggagaacccggagaaagcgtatcactcgaggcacgcgaacatactcgcggtctggtcggggctcataaccggaggcgccgctgacagtctgctgcggaggatactgaccgaggacactcttgacggatacacggatattgacattcagccgtatttcatgcactatctgctcgagattgtgcgggagcgcgggatgttccccgtgtacggactgcgcctgatacatatgtgggacaagcagctgaacgattcgccaaagggtctgaaggaaggctggaacgagtttgtgggagacaacagtcacgcgtggggaggcaccccgacgtggcagctcactatggcgttcagcgggttcagaatgcttgagccggggttcgcgaggttcagtctgtccccgtcgcttctgggactcaggtatatgcgcgtggcgataccgacgccgaacggacttatagatatacggatggagagcggaaaggaaactgtgataactctgccggacggctgtgagaagcttgaggacggaacatattcgctgtcgctgtaaaaaaatagtaaaggcagtcgtgcgtcggcacggctgccgttttcgttattcagagcgtctccgcgcgtcgcggaattgcctgagcattgccatgatgggtaaaaacatgaacacaaagttgaaatacgagaggaaggacgggtccgcaaagcaatcgaccgctgaaataagtccgatcaggcatatgacgaccgatatcagcacaggtacgcggcatcccgacttatatattatgattccgacagcaatctgagcggcggcgagaaggagcttcaagtgcagagagaacgggtcggcgaagaagtccatgacacccgcggcgccgatcaccgcccttatcagatcatagacagcgagcgccagtgaagccgcgcccccgccgataatgaatcctccggctttcctgaatatctgctcgttcgtaaactttttcagtgaggcggcggtgaggagaacgaggattgccgcccgtatgaggaacgcgatcacagagccggatgttatctgtgccggcatgattgtcacctcctgttatctatcttcacgccccgaaggacgcgccgtaagagttcacaccgtcaatatacgccatttgcggagcaatcgtgacgacgccgttctcaaccttcacctcgttgaagaattccgtgaagaagtcagcgggaacatacgcgtgtccgccgatgatggcggttctgaccggcagagtgatgtcgcgcgacatatttatgacctgaaggtgtcccctgaaggtgacggtcgccgagccgtttttcagcgtcgcggactgtatgtagtcgtcgtcgaccgttatttctccggttgcctcgttgtagctgaccttgtagccgagcgcttccgcgactgccctgagcggaaccatgatgtgttcgccgtcataatagggatcgcaggggagcgcggagagatcgagtctcttttcatccgttccgaccgaaaccgcgtagttgtttccggacggcttgtcgacaacatgagccgcagatgtgagcgcgacggcagccgcgacgagtccgccaataatatttgttatcatcatagtctgttaccgtacctttcacgggaggtcatgttctctgcccccgcagtatttttcggcggcgcttccggaagcttttcaccgttctgtaccgttagacgcggcgtgacggaaaaggttccgcttttttataaaaaaaaatgaaaaggactgccacacgcgcgtatgacagcccgatcggtgttatttgctctttttcccgacctgtctcagtatatcgacagccggagcgggtatccgtccgagataatcgggaccgacgttcagaaggtagtttatgcctctcgccgcaagtctctcgcggatgtcgatgacctcgtccgcgctcttccagttgttgtcgaatgatttgtagccccatgtgtcgttgagtgtcgccgggcactcgtagagaccggttttcgcgccgacggttttgtgttctccgttctcgatgaagtcggtctggttgtcgccgcaggagtggtagtcgcccctgccgttgccgatgcgcgagttcacgaggcagtccggctgatatttcttgaccatggcgtaaagctcgtcggtttccgccggggagatggtgttcgggcagtcgaaccagatgaggcagaggtcgccgtattttgtgaggatttccttcacctgcggctttatcttgcgctcgaagcactttgagaagttcttgtgttcgtcgtccgggaagtcccagttgtttgtccagtacgcttttccgccgcaccaggtcttgccggaggtgtagccgccgccgtcagggtcgctccagtcgaggtcctgcgagtagtagagcccgaacttcatcccgtacttgtagcaggcttcggcgagctccgccgtgacgtcccgcccgaatggcgtcgcgtcgacgatgttgtactttgacacttcgctcccaaacatagcgaagccctcgtggtgctttgcggtgaagacgatgtacttcatcccggcgtcctccgcgagctttacccactcctcagcgtcgaagagtatcgggttgaacacgcccgcgagcctcgagtattccgccatcggtatccggaagtattcctgagcccactcgccgatgtcgctcatacgtctgcccttccactcgcccgccggaaggcagtacagcccccagtggatcatcataccgaaaccggcttctctgaaccattgcttgttatccatggattaaccatcctttctgatattactgtcactattataccagaaagtgcctgtgcagtcaatgctcaaaaccgccgcgaaacatgataaaaaccgtcatttgcgtcctgtcattccgcccgctcgctgagatgatccttttttctgtactccgcgggagtcatccccgtctgctttctgaagttccggttcattgatctcagcgagttgaacccgcactcggcggatatctcgaggattgtcctgccgcagtttgacagcaggtagcacgctttgctgacgcggtatctgttcacgtactcgttgtaggggattccgacggtcttcttgaaatacgacgagaggtaggcgtagtcgtacccgaccttccgcgccagggtcgagagcgagcagtcctcggtgtagcgctcctctatgaaacggaagattgtgctcgccagaagcgccgcgcccgccgctccggcgtccatgtattccgccctctcgccgaactcggcggcgagggagtagagaagccccttgagatgaatcctgtccgcgccgtttctgtacccgatcatcctgtcgatatagaacccggacgggacgaacctgttgtcgacgggaaccctgccggtcagctttgtcgagaaggcgcttatcaggtttggcgagaatatgcagagaacgctgcgcgagtgaacgggcgtcgacattgagtgcacctggttcgggaatataagtacggcttccccggcgctcagcgtgtattcgcgctcatcaacccggacgaccatcccgccgtctgtcacgacgataagctcgaagcagtaatgcagatgcgatgagaacgagaaatcctcgtctttctggaacacgtaataatcgttcgcgaccgggtggtagaattcgtagaaaatccggatcatctccttccagtttgacaatcacaaattatgtctattaattatatcacaaatggcgtgaaaaatcaagtggatatatactataatataatcagaaagcaaaaaaacgtccggaactataaaccggcaagagaaaggataaagtactgtcatggcaaaggaatttttcccgacaatcccgcgcgtcagatacgagggcagaaacacggcgaacccgatggcgttcagattttacgatcccgacgaggtgatcctcggaaagacaatgagggagcagctgaagttcgcgatgtcgtggtggcacacgatgtgcgccgacggaaccgatatgttcggcgtcggaacgaatgtcaaaacgtatggggagaccgatccgatggaaatcgcgaaggcaaaggctcacgcggcgttcgagttcatggataagctctcgatagactatttctgcttccacgaccgcgatatcgcgccggagggacgcacgctcggggaatcaaacgagcgccttgacgtcatcagcgaccttataaaggatctcatggcggagcatgacaagaagctcctctggggcacggcgaactgcttctcgaacccgagatatatgcacggcgctgggacatccccgaacgctgacgtgttcgccttcgcggcggcgcagataaagaaggcggcggagctgaccgtgaagctcggcggaaacggatacgtctactggggcggaagagagggctacgagacgctgctcaacaccgacatgaagctcgagcttgacaatctcgcgttcctcctgaagataacctcggaatacgcgagaagcataggctttttgggagacttttacattgagccgaagccgaaggagccgacgaagcaccagtacgatttcgacgctgcgaccgtctgcgggttcctcgcgaagtaccgtctcgacaaggatttcaggctcaacatcgaggcgaaccacgcgacgctcgccgggcactctttccagcacgagcttgaggtcgcgagaataaacgatctgttcggctcgatcgacgcgaatcagggcgatatgttcctcggctgggacaccgaccagttcccgacgaacgtccatgagacgacgatgtgtatgctcgaggttctgcgcgcgggcgggttcacgaacggcggactaaactttgacgcgaagacgaggcgcggatcgtacacttgggaggatgtcgcgtacgcctatatcgcgggcatggattccttcgcgctcggtctgaggctcgcggagaagatactgagggacggcagacttgacgagttcgtcactgagagatacaagagctacacgaccggcatcggaaagaagatcgcagacagaaccgctacaattgaagaactcgaagagtacgcgaagagaatgggcgacgtgacaacgaacacgagcggaaggcaggagtatctcgagagccttctgaactcgcttatgttctgagaaggagagaatatgcgatacacactcggaatggatgtcggaacgtccggcacgaaggcggctctctttgacgagacgggacggcgcgccgccgccgtgactgtcgattacccgctgtatcagccgaaaaacggctgggctgagcagtcgccggaggactggagaaacgccgcgataaaggcgtccgccgaagtcgtcagaaagagcggcgtcgataagaatgatatagtcgggataggtctcacgggtcagatgcacggtctcgtgatgctcgacaatgatggaaatgtcctcagaaacgcgataatctggtgcgaccagagaacaggtgaggagtgccgcgaaattgaggatacaatcggcagaaagcgccttattgaaataacggcaaacccggcgctgaccggcttcacggcgtcgaagataatgtgggtgaaaaagcatgagcccgagatattcgcgaaatgccgtcatatcctcctcccgaaagactacatacgatacgtattcaccggagagttcgcgaccgacgtctctgacgcgagcggtatgcagcttctcgatgttccgggaagacgctggtcggaggaggttgcggataagctcggtatagacatatcgacgctcggaaaggtgtacgaatcgcctgagataaccggatacttgtcggaagaaattgcagacctgacagggctcccagccgggatacctgttgccgccggagccggagacaacgccgcggcggcggtcggagagggagtcgtcagaaacggcagggctttcacgacgataggcacgagcggagtggtattcgcgcacagcgatgaaatacgcattgacccagaggggcgcgtccacactttctgctgcgcggttccgggagcgtggcacgtcatgggcgtcacacaggcagctggtctgtcgctcaggtggctcagggacaacgtctgcaccgaggagacaaacgaggcgaaagaaaagggcgtcgacccatacgacataatgtgcgcggaagccggaaaaacgccggtcggggcggacaggctgatatatcttccgtatctgatgggagagcggacgccgcaccttgacccggactgccgcggggcttttgtcgggctgtcggcggttcacacccgcgcgcatatgataagggcggttctcgagggcgtatgctactcgctgaacgactgtctgtcggtgctctctgagatgggcgttgtgaccgacgacatgaaggtctgcggaggcggaggaaagagcgggttctggcgtcagatgctcgccgacgtctatggcatacctgtctcgaccgttgagtcggatgaggggccgtcgctcggcgcggcgatactcgcgatggtcggcgcgggaatatacggagacgtttgtgaagcctgcgaaacggtcgtcaggacgaaggagactgtaaccccggacatgaaccgtggcaaggaatataagaagttctacggcgtctatgacgcgctgtacggtcacctgaaggatgatttcggcgcgctcgcgaaattgtaatacggaaaggaaacaacacaatgaaaaaggtactaattttccagggcggctgggacggacacgagccgcagctcacatcgaagcgtttcggacgctacatggaggaagagggctacacggtcgatatattcgacaatcaggaatgcctcgacgacgcggacaagctctgcggatacgatctgatcgtcgcctgctggacgatgggcgacatcacatgggagcgcgtctcaaatatctcgaaggctgtcggacgcggcacgggtctcgcgggctgtcacggcggtatgtgcgacgcgttccggaacaacaccgagtggcagttcatgaccggcggccagtgggtgagccatcccggcggggacggcgtcgactacacggtcaacatccgtcacggctcaagccctatcgtcgagggtattgaggattttcacgtttgcagcgagcattactatctccacattgacccggcggtcgaggtgctggcgacgacgaggttcccgatcgtaaattactatcacgtttccaacaagcctgtggatatgccggtcgcgtggacgaagttctggggcaacggcagggtgttctacacgtccctcggtcatcacgacgacgtcttcgacaagtcgcccgaagcggggatactgatgaagcgcggaatgctctgggcggcggaaggcaagaagtatgccgaagagcatcatctcacgaccgaaagattcgagaacacagcaaaaatgtattgaaaggaaacactaccatgaaaccggttaaaataggttttgtcggggtcggcgcgatctccggcatatatcttgaaaatatcactaacctttacaaggagatcgagatagcgggcgtctgcgacctcatcccggagcgcgctgagaacgccgtgaagaagtacggcatgaagctctaccgcgatatgtacgagcttttcgccgatccggaggtcgacattgtcctcaacatcacccgtcccgcggagcacttcgaggtgtcgagggcggcgctcatggcgggaaagcacgtctattccgaaaagccgctcgcggcgaccctcactgagggacgtgaactcgtgcgtctcgcgaaggagaatgggctcatgctcggcggagcgccggacacattccttggcgcggggatacagacctgccgggagcttatcgactcgggcgagatcggaacgccggtcggcgcggcgggattcatgatctgccgcgggcacgagacgtggcatccggatccggagttctattacaagcacggcggcggacctatgttcgatatgggaccgtactacctgaccgcgatgataaacctgcttggcggagtctccgacgtgtcggcgatgacaaagaagagcttcgcacagcgcacgatcacttcaaaaccgcatggcggcgagatcattgacgtggacgtcgacacgtacatcgccggaacgatgaggttcagatccggagccatcggcacgctcttcacgacctttgacgcgtactatccgtatcaggcgcggctcgaggtttacggctcaaagggaacgctgttcgtcccggacccgaactgcttcggcggcccggtgagcgtattcagacccggagaggaagttcgtgatgtgccgctcacattcccggactactccggaaacagccgcgcgctcgggctcgcggacatggcgaaggcgcttcgcaccggacgtgacttcagatgctcgtatgtccagaccctgcacgttctcgagataatggagggcttcacgaagagcggacacgagcaccatgaggtctccatcgagtcggattacgagagaagaaaaccgcttgacaagagtatgccgacgggcgtgcttgactgagagaatcagcgataaattggtaaaagcatgatcaaagcgccggctgtcagatgacgaccggcgctttattgctatacctttcatacaagcttacagttttgaggcggttttgaaagacggcttgtccgtctttcaaaattcacgaccctatgtcgtgaaagcctcaaaactgtttggtctgaaaattcattttcagactgttaccccattcagttaaaataatagcaaagtgttatcttcccggaagcattctcaccggttttcgggcaggcagccctgtccgccgtaccgaagcccggcacccacaatatcccgtcgtcgtcacagacgaccggcagactgtcgcgctcggtcttcccgagcccgcggtcgttgcagagcttcttaagttttctcgtcataccgccgtacacccagctgtcaccgtccgcgcgggaacgcacgaacaatatatgttttattttatcagaatttaattcagtgcgtattgatgatttgtaaatatttttaagtcttccggtatatttttcaatttcgccgatttccggactttccgcgtacatatatatcacgcttttgccgggaatcagctcattgagcccgggtttcagagagatttcgggtatctttgcgtcagcgtcatcgcctgttgctctcccgatcacgagatatcttgtcccgccgcgcttcacaatgccagccgacatcctgtccggaagcgacacgctgatctcatcctccgatgccgaaagcctcatgacggcgtctatctgttttgccgacaacgcggtttccgagacgagagagaacatacgcatgacagcccgcgacgcgaccggcgacggcgctcccgcgagcttatccgcccgtatcgtcacgcggtcagcgctcacctcacactcacgagcgagctcctccgcgagagacgtcagatactctgcgtccttccgggcagccgcggtgagcctatgaaccgcgtccgcgaaggatgggttcagcttcccgaacgccgggacgagcgtgtgacggatataatttctcgtataagcggtgtcggcgttcgtgctgtcggtgacatactccgcgccgatcgacccgcaggcggcgatgatatctttctttgagagatatatcagcggtctcacgaccctgtactgtcccatcgcccgcaccggcgggatcccggaaagaccgtcgacacctgcgccgcgcgcgatattgaacagaagcgtctccgcgttgtcgtccgcgttgtgcgcggtcgcggcaatgttcaggcggtcgtcctccgaaagaagccgttcaaaggtctcgtaacggaagtttctcgcctcctcctcgagccctctgccggattccctcgccatagccgggatatccgccgtgacaagcctgaaatcgaccccgagcgtatcgcaggtcctcccgcaatgctccgcgtccctctccgcctcgccgccgcgtatgcggtgattcacatgtacggcggcaatataaataccatgctccgcgcagtaatcacgcatgagccgcagcagaagcgtcgagtccgccccgccggaataaccgacgagcactccccgcgccctatcaaacatcccgtactcccgagcggcggcgagaaaagccgccctcgccgcagcgtatcgtctgtcaacaaaaggcataccgcgcccccctcgtcactgcgccatctcctcgggcgccagcgacgtgaatttcgtgtactgaccgaaccatcccatctcgacctttccggtcgcgccgtgacggttcttcgcgattatgacctccgcgacgttctgcttcgacgggtcggtctggtaatagtcgcggttcaggaacatgacgacgtccgcgtcctgctcgatcgctcccgagtctctcaggtctgacagcataggcgtcttatccgttctcgactccgggcttcttgagagctgcgcgcagcatatcagcggcacctgaagctccttcgcgaggatcttcagatttcgcgatatatccgcgacctcctgtactctgttgtcgatccgcctgtcgctctgcatgagctggaggtaatctatgaccacaagccctaaattcttgacccgtctgagcttcgccttcatggcggtcgcgccgattccggtcgtatcatctatgaaaatatcacactccgaaagctgcgaggacgcgtgcgcgagctttgtccagtcgtcgtccgtgagctctcccgagcggatattatggctgtcgaccatagcctcgctcgaaagcattctcgaaacaagctgctccgccgacatctcgagcgagaaaacacacaccgccttcttcgtctctctcgcgacgctcgtcgcgatattaagcgcgaagctcgtcttacccataccaggtctcgcgccgataagaataagatcgctcttacccattccgacaagcaccttatcaaggtcgccgaagccggtaggcgttcccatagtctccgcgcggttagtctggagaagatgcagatgctcataagtcgacacaagcacctcacggatatgcgtgaaccccttctgctcatttccctcagctatggcaaagattctctgctcagcgttcccgagaatatgtgacacgtcgtcctcagccgaatacgccgactcggatatctcctccgacgccgttatcaggctccgaagaatactcttatccttgacaatctgcgcgtaatccgcgacattcgccgccgacggcacaacgtccgcaatcagctttatataagactgactcgtcttctcgtcatacacgccccggtgaacgagcgtatcaataagcgtaacgacatcaatcgacctgttctgaagataaagatcctgcatagcgagatatatctgcacatgactatcaatataaaaatcctcgctcttcagtattcccgcaatgacattgaagcattccggatcaataagtatcgacccgagcaccgactgctcagcctccagcgaaaacggcagcttcctctggataagttcgccctcagccatctttatttatcttcttcgacgtcaacgacaaccttaccggtcacctcagaatgaagcttgacgctgaccgtggtcttgccgaaattctttatcggtctgtcaagaagtatctttctcttatcgacaactatcccgaactgacccttaagcgcgtccgcgatctccttcgacgtcaccgaaccgtaaatgcagccgtcagcgccaacctgattcttgaacttcaaagtaatgctctcaagcttcgccgcgatatccttagcgttctgaagctcaaccgcctgacggtgcttctccgcctcctcgcgcccctttatctcattcagcgccttattatccgcgataacagcaagcccacgcggaaacagaaaattgcgcgcgtatccatccgacacgtcaataagctgtccttttttgccctgggtctttacgtcctgtgtaagtactaccttcattttttatttctccttatatgtttgtttgcagggggaaagaagacccttcgagaagggtcttccctccccctgcaccccctcctttttccccagcttaaaaaaatgggaaaagaaggttttattcctttttcatatagtcgtcgatggccgcttttaagcttgtaag

SEQ ID NO: 4536 - DNA, 9859 bp, Unknown
  16S sequences of unknown bacteria
cagactcttgatttgccgaacaaaggcattttatttgataatcagtgtctcgcccgattttaccgaatagagcttatcgtcggcggagaaccaaacggttataagcgagggattatagactctgctgcagtcggcgctgaaaataagcgaatcgtatgccgatacataatcgtaaatctcaatatttgtcgcataccaaacatcgggctttccggaaagctctttgcagattcggtcaagcagatcccaatttttattgttttcaaactcaaagctgtgcccccaaaggtagaaaagtcttggagtctgagacgcgttgtaaggtggcattggctcgtttaaaaacttatcaatatagccgaacagctcagggttggtgtggtgggcggtaggcatccaggcatgccagtctgtcggcagggcaaagctgtcgttatcgccgccgagggtgcgggaataaactattccgaggtctttaaggtaatgctttatatctgcgtagtcagcgccgttttcaaaccgtgttatgccggaatcggggtatgccattccgcgtattatcataccgaaatcattttcaagttcggttctgcactcaagcacgtcgcgtatgccgtcaacaggcgatacttttcccaaagcgcggtggtatttaccgtgcacggcaatttcgttgcccgtatcgataagatattttttaatttgttcgcgtgttaaatgccaatcgccctctttttcggctataaacccgctgtttatgttaaaggtgcatttaagcccgtgggcgcaaattgtctcggaaaaacggatgtcgtccctgcagctgtcatcgtagctcagcgtgaccgcctttgcaagtccgcccgggaaacgcaaaaatctgtagtgcatagtaaaaaacctccttaggtaatataatcaggtgacctgatttattgtctgtttattgcagcagcagcttttgaaaagcttgtctgtatcaagccttttttcattgcgatttaatataaagccgagcttttcacaaagcctttctgtatcggctccctcataaaatgcgttaagaaccgagcgctccgctgccacgtgcagcgtactgcgcagaagtccgtctgcaagaaaatcatcggtaatgagcttaaaaataatcattttttcaccgtcaagcgtgtaaaggcagtatcctaaagcctcatcaccgcagcgtgcctcaacacagcccgatatatcggagtatgtaagcccgttatcctcccacgcggcgcgtattttttctttatctgttaagggtgataaggtaatcaattttcttcctccctgctttgcgatacattggtgagtctgcgcatttcgcgctcgtttaattcccgccatttgccctgcggcagcataccgagcttaacgcccgcaatttcggtgcgcttaaggcggacaacgcttaaatttactgcctcgcacatgcgccttatctggcggtttctgccctcattcagtataaaaataagcacggttctgtcttccctgcgttccgctacaaagcagtcgcaggggagcgtttttttaccgtcaagcaaaattccctcgcgcagttctatcagcttttcgtccgtcacatcgccctttacggttacgcggtaggtcttgtttacatgggaggaggggtgggtgagcctgtttgcaaaatcaccgtcgttcgtcattaaaagcagcccctcggaatcgcggtcaagccgacccacggggaaaaggcgcacgcctgcgtcctttactaaatcgcaaacgtttttacgccccaattcatcctttgcggtggtaacatatccgcgcggcttgtgcagcattatatacaccttttcggaaaccggtaataccgccttgccgcgaacggtcaccttatcccttttgggatcgaccttcgcaccgataacggcaacatggccgttaacctttacctttccgttttctataagctcctcggcttttcggcgtgaggctacgccgcactccgcaagatgcttctgcagtcttattctgttatccttcattctgtactcctaaatgcttaataatatgtattttatattggctaaaagctttgaacaaacgctttgctgcggctttgttgccgcaatgccgcgcggagcttttatttccacggtttcgataacgctcccgttaaagctgtattcggcatatcccaccgtttcgccgcgggatacgggtgcgtataaaaagcggggaagatctattttacagcttattttttcggtttcaagcgtgtttataatatacggttctataaaaacatcgagatcttcattgtccgagccgataacgggcagggaaaaatgtgaaatttgaggtgtgtaggaggtctgacctattgaatcaatcccgtaatcgagcagcgaaatatggtcgcgccagtcatcggggtcgcaaagggttaccgctaccgcaagcttaccgtcccttcgtgctgccgaaacaaggcagcgccccgattttttggtaaagcccgttttgaccccgattgcaccatcgtacagctttaaaagcttattgtggtttgaaagggtacgcttatacggcggattgccgtagcaaagagttgcggtttttgaggcggcggctttagcaaattctttgtttttaagcgcgaatgcggcaagcagcgccaaatcgtgtgcggttgtgtaatgcccttcggcgtcaagtcccgagggggtcacaaagtgtgtgtttttaagacctaattctgccgcgcgcttattcataagctcggcaaatgccgtaaccgagcccgaaatcgcaattgcggtaacatttgccgcgtcgttgccggaggctaaaagcataccgtaaagcaggtcgtgaagtgttacggtatcacccggcagcagccccattgaagagccctcgactcgcagcatatccgccgttacggttatttcatttctcaaattgccatgctcgcaaagcaggagcgatgtcattattttggtggtgcttgccatcggcaggcgcatatcggcgttttgagcgtacaaagcttcgccggtatcgccgtttattaccgccgccgctttggcagacgatgaaacggcacttaccggcaatgaaataatcgtacatataataacaagcgcgacaatttttttcataaactccacctcttaaaaagcttattaaaaggggagagcttatattactcagtctgcgtttttgcttttattctttgagaaaagctcctttgcgcgctcaataacatcgggcgccattgcaaacgccttttcggcagagcttaattcattgtatacgggcatcattttaacgctgccgtcacacacggctataaaggcaacaggtgctattgtaacccccgcgccgccgccgccgccgaaaagccccgattgggtcttgctcggaaaatcgctgccgccggtcgcaagcccgaaggagacctttgaaaccggcagcagggtaacatcgcccaccactatcggatcgcctataatagtgttggcgtccaccattgcgcggagcttgtccatcgttacatccataatgcttttaatgctgttttcgctcataattcattcctctttttaaatttattgaattccgaaagcgccgcaaaggcggctgcaagcaggaagaatagctgtaatttaattcttgccgaaaatgcaagaccgggctttgtgctttcaaagtctgcacgaatatcaatttgcttaaatgcaatgcttgaaagtgaatcaagcagacttaaaagcgggtataccgcggagcagaccgcgccgtaatagattgcggtaagcgccgcatcgtccgttgcgacatttatacccaaacaaagtcgggttattctgatatgccgcagctgattttttattcttagaataagggcttttacaaaagccgttatctcgccgagtgcgaccctaaagcccttttcgcggttgagctttttaaaggggttttctgcctgcttttcagcctttttatcgctttccgcgtctgatttgggctttttaatatcctgccccggctcaattttaaaaattcgtattcccgcaaatctaacggtcataaaaaaatcatcggtgtacataatatcaaggcttataggcaggaaaagcagaagaacgattaaaagaacgattgcggaaataataattaaaggaatcaagcggtcacgctccccgaagtctccgcagccgtttcctcgtcaagcggtatttgctcggcggtgctttcctcggcattctcgtttttaggcagcggcggcaattccgacagatcgtttataccgaagcagcgcagaaaatttttggtggtgccgtaaagcaggggcttgccgggtaattccaatctgccgcgctcctcaataagccctttttccacaagtgttgtaacaacgccagagcaatcaacgccccttacctgctcgataaacgattttgtaacgggctgattgtaagccacaaccgccaatacctcaagcgcggcgggggacagcggcgtgcgccgtcttatatcgaacattttctttatataatcggcatattccgccttcgttgccagctgatatgtgttatcaagccgcaaaagctccaagccgcttttttgctcattgagctttttttcaagcgcttccattacctttacgaccttttcgggcgtgatatcgaaaacctgcgaaaagcggtctatgctctgcggctcgccgcccgagaaaagcaccgcttcaaatgcggaggtaagctctgacattgtcatttgcgtttatgctccttaataagtgttatacctgcgtcctctgcgtcgccctcaattttaactcggttcgccctgcaaagctcaagcaccgccaaaaatgtggcgacaagctccgagcggctgtttgccgttttgtaaagcgacataagctttttagatccgcccgaccataaattgcgcattacaaaaacaattttggtggatacggcaacaattttttttgccacgattttggtaaacggcgcggttgagggcggtaaacggcgctgacctctgcctaccgccgcaagatacgaaagatacataacatccggcgagtgggtaagctcgtaggtattgtcaaattcaggctcggcaggcttacggacgaatttatcaaaccccgactgcatagtcgacagctgcgctgcaatctgcctacagaccatatattctatcagctcgcccgtcagttcctccttaagcctttgaatctcctcatggcgcggcagcagacttacggtcttgatgtataaaagccttgatgccatttcgagaaattcgctttttatctccatttcctcactgcggaaaagctctatctgcgctaaatactggtctataagcactgacagctgaatatcgtaaatattaagcttgtttcgggcaatgagctgcaaaagcagatcgagcgggccctcgaaaccttcgattttataagacggtatatattccataatcaaataaacgccgcaaatggcaggcttgccagcatatttaaaagccacataacgccgctgcttaaatagccgagcggtttatcaagcacaccgatccagataagagccataagcgcaaagaatatatagcgctcatagcgcataagtgcgtaatactgcctgtccggcagaagtgcggataaaaggcgtgagccgtcaagcgggggaatgggtatcaggttgaaaacggcaagcgaaacatttatgctcgcaatgtagaaaaagaaaattgcaaagtaaaaaaacaccgcgcccgtaagcagataacgaaaaatattgcagataataagcgatataagcgcaactatcaggttagataccggccctgcaagcgcggtaatcgccatatcgcgcttcgggtgcttgaaataggttggatttacgcctacgggctttgcccagccgaagccgacaagcagaatgcaggcggcgccgatgtaatcgatatgcgccagcgggttcagcgtcagcctgccctgatagcggggcgtggggtcaccgagctttgaagcggcaaagccgtgggcaaattcatgtatcggcagtgttaaaaatattacaacgagtgtggaaagaatgtaagctatgccgtctccgacagaggttattcttcccgatataagttgatttatcaagcaatacagctccaatcaaagtagatagtataattatataacatagttaaagtaattacaaggtttttttgaagagaggccttcttaattaaatcttaaaatttttggaggttgtttttttgaaaaaatgtgttataattagttagatttattgtaacccgcaatctgaaaggaatgtttgtaaatatgtctttcggtaaagcaggaaataatatcctactttttttcagccgtactctcccacgcttttttacggagaattttgaaataacaagcacaaagaaatcaaaaataatcggcacggtcatatgtgccgtgacccttatagccgtaatactagatgtcaacgcctacacctcgcaggaatttgcctcaaaatgggtgctgctcgcgttcgcgcttatgtgtccgtttattctcggaatcgccgcggcatattctgttgtaatcaaaaccgaccgattgaataaaataatgcattttgcggggctttttctcatgccgttcgtgaccatcacgatgaccgagtgccttaataatgtgtttatttacaatatgacctatttgggcttcttcgggaattatatgctcgtgataataatgtatttcctggtcttcgccgtttcgggcagcttcaggctttcatatcttataatcaacccgatacttttcggcttcggcgttgcgcacagctatattatggatttccgcggtacgccctttatacctatggactttttgggaataaagaccggtataggtgttgcaaacacatataattatactcccacatataaagtaatgaccgccgcgcttatatttatttttattataatcataggcgcaaaaacgaaaactcccaaatataatattcttacaagggtaatatcgcgcacatttgcgggcaccttttcctcggttattcttattcttttctatttcacaagcatttttgccgatatgggcattaagccggatttctggaatcagtcgagaggctaccataattacggctttgcctttaatttcttctgcaatacgaaatatctttatatgtcgcagccgagcgattacgaccccaagcagataaaggattatgtgagcagcgttataagcgataccgacgataaaaagaatgaggaggacaattatacaaagcccaacatcatttgcataatgaacgaatcactttcggatctgaaggtactcggaagccttgaaaccaacgaggattatatgccgtttatgcgcagtcttaccgaaaatacaattaagggcaatctttatgttccggtaataggcgcgggcacctcaaataccgaattcgagtttttgaccgggcacacgaccgcatttttgccgtcgggcagcaacgcgtatatgctttacatcaaaaatccgatagcctcgcttgtttccacccttaaagggcagggctattccgccgcagcgctacatccgtattatgccgagggctggaacagaaccaaggtctacaattatttgggctttaataaatttacaagccttgaaaatattattgatatttcacttatgcgcgaataccaggcaaacggcagtgacccaaattacctgcaatcattaatagaacagaattatccgggcgaaaatatgctgatacgacagtatataagcgattcatatgactataagcttttaataagggactatgaacagcgggataagtccgttccgtttttctgctttaatgttacaatgcagaaccacggcggatacaccacaagctgcgtaaactttgacgaaagcatttacgccacctcggtttcaaagccgtataccaaagcgaataaatatctgtcccttgtaaaggcgagcgataacgcctttaaggagctgatagaatactttaaaaatgttgacgagcctacggtcatctgtatgttcggcgaccaccagccctctgttgaatcggattttatagccgaggtcataggcacgagcggtttgtcggggcttaaccccgcacaggagcagagccgccatgtaacgccgtttataatatgggcgaattatgatatcggctcgcagaccattgataaattaagctcgaactatttgtcctccttggtgcttaagacagccggagttaagcttacggaatataacaagtatcttttgaagcttgcggagacgctgccggtcattgatacggtgggatatatcgacagcgaaaacaactactacaaatggagcgatgtatctccctacagccatctgctcgctgaatacgagaagatacagtacaataatattttcgatcaggccaacgccgattccgacatattctatattaacggatatgtgcctaaggctgccgaagaagaagcgtcaagtgagaacggggaggaaaattaaatgcgcaacacctcgctttgccatatagaaaaggacggcaagtaccttatgctccaccgcgttaagaaggaaaatgatttaaaccgcgataaatgggtgggcataggcggaaaatttgaggacggcgaaagccccgaggaatgcaacgcgcgcgaggtgttagaggaaaccggacttacgctgctttcatcgcactaccgaggaatagtgacctttgtttcggataaatgggaaacggagtatatgcacatattccattccgatagcttcacgggtgaaattaaggaatgtgatgagggaacgcttgaatggatagataagcaggagctttataacaaacctatttgggagggcgacaaaatatttttaaggcttttggaaaagccatcgcccttcttttcgctgaagcttgaatatacaggcgataggctgataaattccgttctgcattttgcggaataaaaagaggaagttttatgaatatctgcgtttacggtgcttcaagcagcaccattgcaaaatcatatatcaatcccacggaggaattgggagaaaaaatggcaaagcgcgggcataatctggtttacggtgcgggcgcgctggggcttatgggtgcagctgcgcgcggcgttttaaggggcggcggaaaaataatcggtgtagcccccgctttttttaaggtagacggcgtacttttcgatgaatgcgacgaaatgatctataccgatacaatgcgggaaagaaagggtataatggaggaaaagtccgacgcgtttatcatgacccccgggggactcggcacatacgatgaattttttgaaattctcacattaaagcagctgggcaggcacacaaaacccatagccgtatttaatatcaacggttatttcgatccgctgcgcgcggtgcttgagaatgcggtaaacaagcagtttatgaccccgcaaagcctgcggctgtgcgaatttttcgatcggccggagcggctgcttgattatcttgagaactgctcggacgttctttattcgatctccgattataaggatatcaagagatagaataaccgcacagcttcgcttgcttcacaggcacgcctgtttttgataaacgttttttaggaaatgtcaggggatcgccctgacatttttgtttcggtatgttatggtacaatagataggtaacaaaataaaaagaaaattcatctcaaatatggtatgatgttaataacgacaaaaacaaagtaccataagaggtgaattttctatgacaagtataacatcaaaa

SEQ ID NO: 4537 - DNA, 6728 bp, Unknown
  16S sequences of unknown bacteria
tggtgggaactacagggctcgaacctgtgaccctctgcttgtaaggcagatgctctcccagctgagctaagctcccacattttgtcaataactgacagtgtcggcacctacctatctttccggggcgtcgccacccaagtattttcggcgaaattcagcttaacttctgtgttcggcatgggaacaggtggaacctgaacgcaatcagcaccgactgtctgttattaaccgctgtctgattgacagcttaatcagtatatcacaggcagtgggttttgtcaacgattttttaatttttttgtgtttttcctcttttttatgatatttttcattggtttttgtaaaattttggctatatttctataattttctcttaaaaatcacttaatcttaaccgaaattcttgtggtctgttcttgttttttcaaacttacggcgtagcctacggagtacgcaactcttatattgccgtcaatttgtctgccgtcctccttaattttttccaaaaaataggggatatactgccgtgcattttctcttatatcgtttacatacatcatggcataggtgccggcaggcaaaatgcgtgtattttttatgcctaaggggtcatctaaaatcaattctgtggaacagtaagtgtcaaattttccctcaatggcatctcttgtgctgtaaacgcttaaaactctgccgaagaacatttcttcataagagtggctggtttgcttttcgataatctgctgaaaatccacaaccgtatctgtcaaaggggcttttacatcaatggggcggtcaacatataaagcgtattgatccggcagtttttcgtaaaacagttttccgtgttcggtagataccgctttttctatttcctcaattctgccggagaggtttttatacattctgtttaaatcgtgtatctgatattttatgattgactgctgggtttttaatgcgtctaaggtggtttctatgcttacatcaccctgtaagcgcttgatttcctcaataggcatattcaaatagcgcagatagcgtatcatcggcgcataggaaacctggtttaaagcatagtatttgtaccctgtttccgggtctacatggtcgggggtaaacaggcctattttggcatagtaacgaagggcagagggagctatacccgttaattttgacattttatttactgtgagataacctttcatagccattcttcctttatcttttttatcattatataatatttttttccataaaacaacccgacagatatatatgatatttaataaaaaggcaacttaaaacaccggcttttaaggtcggtgttttacagcaatatctttatattccgttgtaatatttattgatttaataagattttagaagattatttgatgtttaaaatcataggcgtgtgggggataccgtcctccaaaaattcctctccccggattttaaaaccgaactttgcgtaaaaacccacggcataggtttgcgcctcaacaaaaattttgctttccggcaggttgttttttatgtactcaacagccgccggtataatcacattgccaaggccggttttgcgggcaactgtcagcactctgcccatttgcaaagtgtcccggtcttttttgtaaaatcttaaataggccttaatttccccattttcctgtgccaaaaggtgataagcctcgtaatcggccccgtccgggtcaaggtaggggcaagtctgctccacaacaaaaacccgacagcgggcttttaacacctcgtaaagttccttttttgtaagttcctcaaactttttaacagaaatttccattcttactcctttgattgcaattcaataagttttgaaatcaatttgtggtcgtggtttttaacaaactttgtatttccgccaaacaaagcggtgttttcttcctctccgttacagggcagccagccgctgtaagtttccgtgttggggttgccggtgcgcataaaggccataaaacgccgaaaaatttcatcttcaatctttttgtcaatatctctttggtaagccggcaaaagttcacagtttgagaagaagtagggaatatccgaacaatgccaaggcacgcacttgcctttaacatcaaaatcttcattgagaatataagcgtaggtgttgccgttcagctttgagcgcaatttggcatactcaatatcccccgggcggaatgtggtgtccaaatttaaaatgtcaacagggtttctctccgggtaagcggccttaaacagccgaataatctcatctgccttttggccgtaaacctttttaacctcattttcaccccgggcaaagctcattttttctttgtcaaatttcgggtctggaaatcccaaaaattcaccgaaaacgctgccgtatatggccggaatattggcggtttcttttctgaaaccgttttttgccggggcccctgcatagtgttcgtttgggaaaaggcaacagccggtatatctgccccggtttttaaaatctttttccgcagaaagatacgccttttgaagaacagaaagccgaaccttttcaagctctttaacatcttttacatcggcatatttcataacccgcagggcaaagtccctgccgctttcgccggcgtcggggattaacccctctacaacaccggacatatttatcactttgtgatacaatccgtcggcctgtgggcattggagcaatgcggttgtttttacaccgccgccggactgccccattatcgtgatatttccccggtcgccgccgaatttttctatattttcgtttacccatttcagtgcggccaaggtgtccgccgtgccgttgttgccggaattttcatactcccggccaaaggcggaaaggtcaaagtaacccaacacattcagcctgtggtttacgcttacaaccacaatatcgccttttttggcggcgttgtagccctcataggcaagctgttcgattgatgaaccgtctcgcaaaccgccgccatggaaccaaaccaaaacagggcgttttttatggtcaagggcaggtgtccaaatgtttaaatttaggcaatcctcgttttcaacccaaagtctgtgggggattttcagctctgtggtaggcttcggcacacttaaaacagggcatacggcgccgtagtttgtggcgtcgaaaatctcctccgtataagtcaccggcttcggtgagtgaaatctctccgccacccggtaaggcactcctttaaaattgaaaacatcattgtaaaaatagccttgaattttacccccggttgtgtcgacaatccgggaatttctgttgcatacaaattgggacataatagaaaatcctttcgtttttattggtatcatcatatcatttaggggcaaaataatcaatatttaccgaaaaattaacgaaaaatccccattttgtacttaactgagcgaaaaccgagcaaaattttcaaaaaatcccgtctttttctttaaaaaagtgcaaaaacccccttttcttccccaaagggataattttcccggtctttcgttgtaattttccatatataatgatatacttacatctataaatacgatttaaaggagagtttttgtggatacatttttacaaaaatttgaactctttgcaaaaaagggtaaacatataaccgccggggcggtgtttttgctgtatgggattttaaccgtctacggcggcggttctctgtgggagatgtgccgcttttgtttctttgtgcagatttttgtgtatttgcccggcagtttttgcaatttattgctcaaaacaaaggaaaaagtaaaggaaatggacttcgcccttgatttgctggcaggtatgggtctgtttttggttttgtactgttttgccatgaggctgtcggctaaacccctgcttttctttgtgccgccggttatttccattatttattgcctgttgtgtacgaaaaacgaaaaagataagaacaaagccgaaccctatgggaaaaatcttaaatttttgttatttttggctctcttgctcttgtttacatttacaacggttataaaaagcgcactgccggaaaatgtgggggacacccttataaaccaagatcttctttggaatgtaggcaatgcaaactcatttacaataaggtttttgccggaggacatacgctattccggggtacaactgcactatcattacttaaccgagatgttccggggggctttaagcatggtaagcggaatttccgcttataacataatcgcattttacattgcgccctacaccctgtatcgggttgtggagtgcctttacatattcggcaaaaagtatttgaatgaggataaaaaagcattgatttttacattttcaatgtttgttttcggctgccggggtatgtggacttgctttgcaacaggcagaagtgtattttttaacgacaacgccctgcatatcataacaaatataaattcacaggcaacggcagttatatttttaagtatattcggggggatattcagcgatatttccgataaagatttcaaggtaagcttatttgaatacttcctttgggtggcgtcgttttttatgctgtgctttgcaaaagggccaatagccgccgttgcggtaatcggcgttgtcatatctgttgtttggaagtttgttcaaaaacaggcaaaccttaaaagtttgatttttgccggggttttagggggaattttccttgtgatatacaaatttttcttctcctccggtgcagggacaagtatgatgttttccctttccgccactgcggagcgcacaattttcggcaatcggcttggcaacctgtattatgggggcaaaatcaccctttggcgagcaggctgttttgctgtggcggtaataacggtgttcgccgctttgcccttgcaggggtttatatacgccgtcggggttgtaaaaaattatctgcctaatctgtttaaattaagcggtaaacaactgtgggtaaacagccagatagccgggggaattttggcctttttcctgtttgaacactacgccttttcacaggtttacttcttctttggggcaatattctttttgcacttggcctcggtggaaaacgcccggcttgttttaaataaaaagcccttaaaaatcgccgccggttgttttgccctcattcgggttataacccaatgctttatgtatcttaactttataggttccggggcaagatttttggccaggaacctgggaattatagaaaaatatccctattctgcggttattaaggcagacgaccaaaaggccatggaatatttaaaagaaaataccgatgataatatcctttttgccacaaacagaattgatacatccccggcaaagggagacggcatttcaaatatttacaccgccttttcttcaagacagagttatatggaaggctgggcttatgcccttacaaatatgggcgtgccgtattatgtggttgagcaaaggagaaatatcaacaatcggcttttcgccgaagataccgatcgggaaactttgcagtatctctgccgggaaaccggcataacacacctggtgttttctcggcagttcccgggcagtgaagatgtgattagtcaaacatttgaatgtgtttattcctccgattgggtgagaatttacgccaccggcgttgcacctatggaaaaccacccactttaccaagaacaattaagccggtatggccggccgaaggaagaagaataattcttactttaataaattaccccaaaaatccgcaatttcgcctcccttgtgtaaagggaggtgatttttcataagaaaaatcggagggattgaccttggtacgataatctgatttataagcgaacttacaaccaagtatcatatataaacaaaatgtttatcaatctctcagtcagctgcgctgacagctctctttaccaaagagagcctatattttgcctcccttgtgtaaagggaggtgatttttcataagaaaaatcggagggattgaccttggtacgataatctgatttataagcgaacttacaaccgaatatcatatataaacaaaatgtttttacaatctctcagtcagctatcgctgacagctctctttaccaaagagagccgattttgcggtttgtttgggttgttgatttataagggaaaaacagtttaaatagtttgaaaagaggcgaccaatggtcgcccctacgggctatttgtgatttaccgctgtcggttgcagaataatatttcaaaaaaattaagtgccttgccggtcataaacagtaattataaagttaaatcgtaggggcgttcattgaacgcctatgcaaaccgcaggtttgcacataagcaacctgtttacatcagatttcggttacaaataaatattttaaaaattcatattatccttggctccactgtgcaaggggagctggcggcgttagccgtctgaggggttgtcaaacagcttgtttacatcaaatttctgttacaaataatagccccaaaaatccgcaatttcgcctcccttgtacccatagggcataacatgtaaagggaggtggtttttcgaaagaaaaaccggagggattggccttgatacaacaacctaatttgcaagcgaacctacaaccgaacatcatatataaccaaaatgttttccaatctctcagtcagctacgctgacagctctctttaccaaagagagccttgcaat

SEQ ID NO: 4538 - DNA, 3339 bp, Unknown
  16S sequences of unknown bacteria
aaatatatctataaaaataccgccgatgacatatccgcactttggacgcgtcacagacggtatcgttccattttatgggtattcttatgtggttcaggaatttccgtttccagcgttcgcatcaggcttcattgcaagcacggaagcatccagcccgatgccatcctgagccgcaccctcaaaggctttcatgggcacagacgaaagttcctcatccagagctgaatcctctgctgtctcccctgtttccttttctgttgtatccaagatgtgagaagatgctttgggctttttgaccttgcccagcgggttttcttcaatagccgcgcgcacctgaaattcctgtaggtgcgtataaatttgtgtggtagacacgttgctgtggcccagcagctgctttaaagtcagaatgtccacattaccagtctgatacatcagagttgcggcagtgtggcgcagcttatgtgtggaaaagccttttaatccggctgctttcattgcaccggtcactagctgttctaccctgcggttcgagatacgctctttgcgccgtcgggtaataaagaccgccttttcctgcggcagaagcccctccatcgtattgcgtttgcccagatacagccgcaatgcttccatgcaggcatcattcagataaaccatgcgctccttgtggcccttgccaaacaggcgtatctggcggttttccaaatcaatgtcgtccagattcatgccgacaagctctgccagacgcattccacagttcaaaaacagcgtcaccatgcaataatcccgctccggaaaatcgctttgggtctgcgtgctttccaataactccatggactgctccgccgtcagatatttgggcagtaccttatcctgtttgggtgggtggatggccgcagtcggatctgcatccagccggttgacctgattgaccaggtaatcataaaagccgtgcaggcttgccagccgccgggccgttgaagactttttgttgccgcactcgcggtttaaaaagtacagatattcgtagatatcctcctttgttacggaggcccagaatgcggtgtccagccctttggggtcgatatccttcatctcgctgtcttcgggcacaagcccacggcggcgcttcataaaacggctgaatccgcgcagatcacagtagtagctgaacgccgtgtttgcgcttttgcccgcgatcacttccagatagcggacgtattctacaatgtccggcgcagcatcatcgaagggcttgtgcttgccgggatttttctcgtccagatagatcgacattgtttttcctcttataagcggtcagatttcagggcattgatcgcatcggtgatataagccgcgccgatcagctgcattccaggataatctgccggactcagatgattcaggctgtgcttcgggatcaccgcacgttcaaagccgatacgctctgcctcatgcaggcgctgttccagattgggtacgctgcgcacttcaccgccaaggccgacctcgccaatggcgatcagcttatcgctgacgggcctgtccagcagcgaggagaccatactcaagcagacagaaagatcacaggcagtatcacgcagcgcaatgccgcccacgatgttgatatatacatccaggtttccaaagaaataccctgcacgcttttccagcacagcgatcagcagattcatgcggttgtagtcgtagccgctgcaggcacggcgcggtgctggaaaattggttttggttgcaagggcctgaatttcgctcaaaataggacggctgccctccatggtacaggccacacagttgccggaaacgccaagaggacggccttccagcagcatctgtgaagggttttcgatctcagcaaggccctgccccgtcatatcaaacatgcccagctcattggtggagccataacggttcttggccgcacgcaggatgcggtacggcagcattttatcgccctcaaagtaaagcaccgtatccacgatatgctccatgactttggggcctgcaatggcaccgtccttgttcacatggcccacaatgaacatggggatctcctgctttttggccacggccagcaggcgggccgcactttccttgacctgacttaccgtaccggcggaggacgagatatccatgcagcgcatcgtctggatggagtcgatgaccacgaggtccggcttttctttttcgatcaggccgcagatctcgtccacatcattctccgctgccagaaagatgttatcctgcggcacttttagccgggcagcgcgcagcttgatctgccgcaccgattcctcgccagtgatatacaaaacgctgtgctggttggaaatggcaccgcacagctgcagaagcatagtagatttgcccacacccggctcaccgctcaaaagcacaacgccgcccagcacaatgccgccgccaagtacacggtccagctccgaaatgccggtcagaatacggcttttttcttcggtcatgctgatctcagaaaggcgttttgcggtcagggtggtcaccccttccgggcgggcggctgccgcctgtttggctgcggcagtacctgctttgggggcttccgctacaacgtcctcgttcatcgtgttccagctgccgcagcttgggcagcggcccatccagcgggggcttgtctcgccgcagttggaacacacatatacagttttcagttttggttccttcatcaaaaagctcctgttacattgtcttggctttattattctctattgtagcatataacaagcaaacccgcaagaaaagcccttgctcaaagcctgcttccaatgcttgcaagcgctgcagaaatgccgcacagcggcacaaataacgtcagcgtcaacagatactgccggatgaatccatgtggccggacgatctcccggtcaggccctgctgcaaaaaaggaacagacgcggacctggctgctcacccgcagagaatctgtgccgagcgtgcacagccctgcagaagcagctgccgcaggcagaaatgcaagcagcagaagccacgtttcctttttcagtgccgtgtcggaaagcagctgcacaaacagcgtcccgtttcccagcccatagaacatcgtaaacaaaaagatcaaaaccggccccagtgcggaaaagcccatcaggaacagaagggtcgcggccgcagccagcgtaagatattccattccgaaaaggctggccgcagtatgtgcatctgcagcggcaaacaggccgcgccagctttgcaggtaatattgcagccagtccggctgctgcttttcgcagaaagccagaagtacgccagctgagccagagc

SEQ ID NO: 4539 - DNA, 7879 bp, Unknown
  16S sequences of unknown bacteria
cccccgccggtccgccaggcctccatgatccggctgacctccgccgggccctctgtcgtaaactggacgcgcagcgcccaaaggccgtggtcccgcagggtctggcgcttatccagcagatagagcttcttcccgttcagaatcacgttccggcaggtgcctgggtcccgcaggatggggaattcctccccggtgcggtcgaccagctttgtctgttgagcctgacagatacaggcgccggtgcggtttttcataatgcagttttccgtcagcatcagcgggaggcgaccgtagacgatcatctccagcgggacggccttggaaagatcccggatctggggcagcgtcatctcaaagctggcgcaggccgagaccaggtcctcccgccgcagccagttcatgctgcgggaattgaagatattgagcccaaaatccccccgaacccggaacccccgggagcgcgccagagaaaactggcccaaattgccgctgagcacatgccggacccccaggtcatagaccgtgtccaactggcggcggacctggctcatctcccggtcccagatcacccggggcaggatcacggtaagctctgtctcgtcatagacctgccgggcaatggcagggtgcgccgcaagctccgccagggggacatagaggacggctggctttgtccgcagcagcgcggccgtcagctgattggcccgctggacactgaccgtcaaaaccggcggcgtggtactgccgggatagagaaacggcttggtgtagcgccccagatgcgccggctcccggcggccccgcagcgcagtcagccggtcgagcacgtcccgccgcatggcgttgacggccgccgccgagagggaaagccccgggtcgacgacgcccttgacctcggtacataggtacggggtcccgccggtctttgccaggcgggcggccagatcctccaagcgcagcggcttgcgcaccgcctcctgaggcggcggaccgactgtcttgcagatgtgaccgtcctcgtcctgcaccgccagcatactgccctgccgccgggtcaccagcgcgtaaaagcggaccggcacccgggcggcctcgcagttttcatacgttgcccgggccgcggcaaaaaacgcgccctcccgggtgggcacaccccggatccccagcatctcccggcctggcccgtcggtataataccgctgggtaaagccctgacgggaaaacgcccgctgcagatcagaaagatgctgccggtccaccggcgcgccgtccagcacggcccggtagatccgcgtcgccgtagcgacatattccggccgcttcatgcggccctcgatcttgatggacgagacccccatctgctccagctcccgcagataggaaagcaggcaattgtccttcagcgacagggggtatttgtcctcctgccggctgtagccgtagggcaggcggcaaggctgggcgcactggccccggttgccgctgcgccgcccaataacggcggacatataacactggcccgaatagcacatgcacagggcaccgtggacgaagacttcgatctccaccgggctgttgcggcagatatacgcgatggccgcccggtccagctctctggccaggacgacccgggagacgcccattttcgccgcctgctgcaccccgtcgagattgtggatcgacatctgggtggaggcatgcagcgcgatctgcggcgccatctggcggcacagctgcaccacgccaaggtcctggacgataaacgcgtccacatcgcaggccgccgccgtgcggatcagctcggcagcctggggcatttcccgatcgctgagcagcgtgttgagcgtcaggtgaaccttcacgccgcgaatgtgacaatactttaccgcctcgcgcagttcatccggagagaaattccgggcgccctgccgcgcattgcagctggcaaggccaagatagaccgcatcggcgccgttttggaccgctgcccgcagcgcatccatagagccggcgggggataacagctcaagcataaaaaacctctatcatctatcaaaaacgcaaaagggaaaaccgtacaaaaacgcgccggaatctccctgtaaactccgaaaaatagtataacacaaaaccatctggcacgaaagagaaaatcaaaaaataccgccgccgcttttcggcgttttcacaatttccccaccctttgcccaccagatgtggggcaaacacaatttgtgggcatttggtagacataattcttcaatatatgccttttccaaaaaaatccacagcaagttgcgcacatattgcacaggtttttccacaattttgcccgggcaaaacgcggtttttcttgcaaaaatctatttttcccccgggaagggccgaaaaaatttgtactttttcacataggaagattatgttcactttccgctttccccttgcgccgcgggcaaagaccgggtatgataagaaaaaagcttgcgtttcccgcaggcgggaggttatctgatgatttattacaccgcagacctgcacctgggctatgcgccgatgctggcccaccgcccctttgaaagcgtccaggcgatggacgagacgctcatccgcaactggaacgagaccgttggcccggacgatacggtctatatcgtcggcgacttttcctataacggcggcgtcgtcccggcccagtacttccgccgcctccagggacgcaagcatctgatccgcggcaaccatgacaccggcctggagaacgcccaggcgctgttcgagtactgcgaatccgtcgtagattactgggagctggacgacggcgaggagcatatcatcctctgccattacccgatgatctatgaaaagcggggctatatgatccacggccatctccacgcccaccgggggcgggcctatacgatgctgcagcagctgccccaggtgctcaactgcggcgtggacgtcaatttcctccgcccggtgacgctggcgcagctggtggagaacaacgcgctgttttacggcccggactctctgcgccactttccggaatacaccggcaagtccgtctgccgggacggcctgctgccccggcggccggatttccgcccgctgccccagcgggggagcgccgcagggcaccccggggattttgttttatgatacgacaaatttgttaaaaaactatgtcctttcgttaagggaccgtttagaaacgcgttcttgcgttgcgtccgccgcctggtgatgctatagattgtagcagaggaaaacaccggaaggaggatgcgccactatgattactgctgttatggtcaccgttggctacaaggtcgtcgctgccgtggaatggctgatggaccgcctgctgcatctgaagtaagtaaaaatcccccctacatcccgcccgccgcgcagcacctgcgccggtgggcggttttccttcccgtataaacgccccagcggcggatacgctaggaaaagggccgccaaatgttgacaaagcggcttcgcgcgtgatacgataattgaaaatgcgtgcacacgccgcgtttcgatgcgatcaccggcccaggcccatccgcctgcggtacgttttgagaaagggggatttttcttatgtgtcatcatcacgaggagagagaaaaattctatatcaccacaccaatctattacccgtccgccaaactgcacatcgggcatacctactgcaccgtcgcaacggacgccatggcccgttacaagcggttccggggctacgatgtcatgtttctgaccggaacggacgagcacggcatgaagatcgaagaaaaggccaagcaggccggcatcacgccccagcagtttgtagataatatcgtcatcggcgaaggcggcgtcaaggacctgtggaagctgatgaacatctcctatgaccgcttcatccgcacaacggatgactatcatgtcgaagcgattcagaagatcttcaaaaagatgtacgacaatggcgatatctacaagggtgcctacaagggcaagtactgcacgccctgcgaatcgttctggaccgagtcccagctggtggacggcaagtgccccgactgcggcggcgaggtccacgaggcccaggaggaggcctacttcttccgcctctccaaatacgccgaccgggtgcaggatctgctggaaaacacagattttctggagccccgtagccgcgtcaacgaaatgattaacaacttcatcaagcccggcctggaggacctctgtgtctcgcggacctccttcacctggggcatccccgtggattttgacccggggcatgtcgtctacgtctgggtcgatgcgctgtttaattatacgacagccctgggctactgcaacgaccgctatcacgattacgagaaatactggccggcagacgtgcattttgtcggcaaggagatcgtgcgcttccacacgatcatctggcccgcgatgctcatgagcgtcggcgagccgctgccgaagaaggtcttcggtcacggctggctactgctggacggcggcaagatgtccaaatccaagggcaatgtcgtcgatccctatctgctggcccagcgctacggcgttgatgcgctgcgcttcttcctgctgcgctccttccccttcggcagcgacggcaacttctccaacgagctgctgatcaataccatcaacacggacctggccaatgacctgggcaacctcgtctcccggaccgtcgccatggtgcagaagtacttcggcggcaccctgcccacggagcaggaggaggacgcggcgatggatgatgagctcattaccatggcctgcgccctggtccgcaaatatgaggacgagatggagcatttcgccttccagaacgcgctggcggagatcttcaaggtcatctcccgggccaacaagtatatcgacgagaataccccctggatcctggccaaggacgaggcaaagcgcccccgcctggcccgggtcatgtacaacctgttggagacagtccgcatctgcgccgggctgctgtgcccgttcatcccggagacctccgaggagattatgcgccgcatcggcgcggaccgatatgactgggtctccatggccttcttcggcacgctgccgcgaaacgccactgtgcagggcggcgacccgctgttcccgcggatcgacatggcaaaggagctggcggcgctggaggagatccaggaggcggcccgccgcgccgcccagcccgcgctggaactggagccgcaggcagagccggtggcgtttgacgacttctgcaagtccgatctgcgggccgtcaaggtcaaagcctgcgagcgggtcaaaaagtccgataagctgctcaaattcaccctggacgatggcaccggcacagaccggcagatcctctctggcatcgccaaatggtatgcgccagaggacctgatcggcaagacgctactggcgatcatcaacctgccgccccggaagatcatgagccgggaaagcaacgggatgctgctgtccgccgtgcacaaggtacacggggaggagcagctgcagcttgtcatgctggacgacgcaatccccgccggggcaaagctgtgctgagccagcttgcctgaccggctggccgcgtccgccccgggctgcttccgccggtaaaaaattcgttgtttgtaaatgcgccggggcgaaagctccggcgcgcttgttttcgccgcacggcggcgcaggatcgaaaggaggcgtttttatgcatcacaaaaaacgaacggcgcggcttctgctctgcgtactggcgctggccatggcactgagcgcctgcggcaagaaaggcggcgcgttccaggggaccgtcacacagatcaccggcacccaggtgacggtgacgccggaccctggcgcagcgatcttaaagcaggccgattccgttaccttcgacgcatccggcctggagaatctgcaggccaaagcgggcgacagtgtctatgtcacctatgacagctacaaaaaatccaaagccgacggcgtcgtcctggaggcaaccggctggcagatgatgatccgcgccccggagacggacccggataccgtccggctctacgccgagcagcagcaggccgttgtagaaggggaggatggcgccttcctgcgccaaacgctgacgagcgccaaattcaaatccgacgaccagtctgacaatccgacctggcgcctgcgggccgacggcacagaatacggcatcgcgctgaccttggaggaaaacatctggcactgccgcctgaagctggaaggccaggccgccacgctcaccggcggggacgcgtttcgcgtcgcagcaatcttcgcggcaaacgggctcaccccggcagactgggccgatgtcaccgccgcctccgggaagaagaccgccaccacagcgctgaaccttcgcagtcgaccagggacagacggcgatatcatcgcagcgatctccgccgggacagctgtaaccgtcacggggcagacctccaccggctggtaccaggtcctttacgaggagcagacactctacgccagcgcggaatacctggaatagagaaaaaagttttccctgtaaaggttttttccttgacatcctggaagaaatcgtttatgatagcagatagtttcccgtcgtgccgatgtgcgcagcggaaggagggcgccggaatggtcgaagagacatttgaattgacgcttctgttcgactattatggcgaccttttaacgcaaaagcagcggtcctgcttcgacctgcactataaccaggatctctccctgggcgagatcgcccaggaggtcggcatctcccgccagggcgtacacgacacactgacccgggcggaagcgtcgctgcgccatatggaagcgaaaacgggctgtgtcgcccgggatcgtgccatggacgaggcgctttccgtcatccggtccgccgcgcagcagctttcccgcgatccgtcgccaggggtgcaggcgctggcgcagaagattcttgccgcggcaagcccgttctgatccccccaccttacagaatcacccaaacgcttgcagagccttttatgcgcttctgatagaaggagttaaaacatggcatttgaaggtttaacagaaaagctctcggcagcctttaaaaagctccggggtaagggccgcctgacagaagccgatgtgaaggaagccatgcgggaaattcgcctggcccttctggaagcagacgtcagctataaagtcgtcaaggactttgtcaaaaagacgacggagcgctgcgtcggcagcgacgttctggagagcttgaccccggcacagatgatcgtcaagatcgtcaacgaagagctgacaaacctgatgggcagcgaaaaccaaaagctgaccatcgcctccaagccgccgaccgtcgtcatgctggtcggcctgcagggcgcgggtaaaacaacgaacggcgcaaagctggccgggctcatgaaaaagcagggtaaacgcccgctgctcgtcgcctgcgatatctaccggcccgctgccattcagcagctgcaggtcgtcggcgaaaagctgggcctgccagtcttccaaatggggcagacgaaccccatcgagatcgccaaggctgctgtcgcccacgcggcgaagcacggcaacgacatggtctttctggataccgccggtcgtctgcatatcgacgaggcgctgatggaagagctctccggcatcaaagaagcggtgcagcccacggagatcctcttggtgctcgacgccatgacaggccaggacgcagtcaacgccgcccaagcctttgacgcacagctggatatcaccggtgtgatgctcagcaagctcgatggcgacgcccgcggcggcgccgccctgagcgtcaaag

SEQ ID NO: 4540 - DNA, 6592 bp, Unknown
  16S sequences of unknown bacteria
tcgggacagttcgctgcgctcacccgccgggaaaaagccctttactgcccattttgacggcggggctcgcaatgtcgcgcgcaatggagttggacagcgttcaccaacgtctggagcgcgctcgtgctcgcctttttccgccgtcaaaatgggcgggcctttttccctccgctgcctatcgccgctctgctctgccgcagctggcactgggcagactcaaatggcgctgcttgggatgtctcgatgcggattgcgtggcttcgcagcacagaaaaaacgggcttgatttttctttgcagctggcactatccatacacaaataacgtcgcttgggatgcgtaggtacaaattgaatatttttgtaacgcaaaaggccagcatggattcctatccacgctggcctttttagcgagccatgaggcctgtcgccgaatggcggtctatactatccaaccaacaagaaagccacaccaaacccgcgagccgcgaggcctgttgccgagcggcggtaaaacccaggccaactcacatggcgttcaagtcccctgcatcgacggggcattagccctgccgatgcagtccgaagaggctcagcctcttcttttcatagggggcggattggacggactggagctcgtagccggtggcggtgatggtggagcggagcagggcttcgtccagcggctgctcgctgagaatgacggtctctcctttggaatgggaggaagtcacctttttaacagaaaaggcgttgcggatggcgtcgttgacgtgggactcgcacatgccgcacgccatgccgttgattttgagcgtggtctggatcatggaaaggtctcctttcggcgcggggcggagaagacgttccgccgggcggaatcagataaatgatggttagaagtttctaaccgatgggagtataggacgggatttggcgcttgtcaagaccagttcttccatttttgggacatttggacgaaaaaaacggaaaaattcagacgaagagacaaaatgaaaaattttcggaaaaaatgtaaaaaaaggggttgacacataaagttagttctgctaaactaaccagcggttagaggagattaaccagctcccctgaccaccaagagcttgacacgctggcttgacgcgtggaagggagagcgaaaacaaatgatgccgttgggaatggcaaatgtgggggacgtgaacatcatcaagcagatcaatggccgcgatgatgtgcgtcagcatctggccgagcttgggttcgtacccggggcggaagtttccgtcgtgagcgaactgggcggcaatctgatcctttccgtcaaggaaagccggatcgcgttggataagaccatggccatgcggatcatggtgtaacaagaggaaggagagggaacatgaaaacactgagagatgtgaagatcggtgaaaccgcagtgatcgaaaagctgcacggcgagggcgcactgaagcgccgcatcatggacatgggcctgaccaagggcactcaggtctatgtgcgcaaggtcgctcctctgggcgaccccatggagctgacggttcgcggctatgaactcagcgtccgtaaggcggatgccgaactcatcgaagtgaaataacccattcacataagtaagcggtttcaagaagaaggaggaactttttcatggccattaagatcgccctggcgggcaacccgaactgcggtaaaacgacgctgttcaatgccctgaccggttctaatcagttcgttggtaactggcccggcgttacggtggaaaagaaggaaggacgtctcaagaagcatgacgacgtcgtcatcatggacctgcccggcatttattctctctctccttacacgctggaggaggtcgtatcccgtaactacctgatcaccgagcgccccgacgccatcctgaacctgatcgatggtaccaacctggagcgcaacctgtacctgaccacgcagctgaccgagctgggcatcccggtggtggttgccgtcaacatgatggacgtggtccgcaagaacggcgatcagatcaacatcgcggagctgtcccgtcagctgggctgcaaggtgatggagatttccgccctgaagggtgagggcatcatggaagccgccgaggctgccatcaatgccgccaagacggccaagaccgttccgatgcacaccttctccggccccgtggagcatgccatcgctcatattgaagaagcggctctccacgatctgcctcaggagcggcagcgctggtacgccatcaaaattttcgagcgggacagcaaggtgctggagcagctgaacatctccaaggatgtgctggatcacatcgagactgacatcaaggccgctgagaccgagctggacgatgacgcggagagcatcattaccaatgagcgttacgtctacatcgccgacgtgatcaaggcctgctacaagaaaaagaacgcgggcaagctgtccgtgtccgataagatcgaccgcgtggtgactaaccgctggctgggcctgccgatcttcgcggtggtcatgttcctggtatactacatcgccatggtgactgtgggctccgcggcgaccgactgggccaacgacgggctgttcggcgacggctggcacctgttcggcatcggcagcggcgcgtatgaggaagcgtcggagaactacaccgccgccagtcaggcgctggaggccttcggcgtggagatcgacaccgaagccgaggactttgacgctgccgccgctctggagcagatgaaggccgtagcgcccgccgaagaaaccgctaccgttacggtagaggacgaagaaactctggaagaaacggaaatgaccgcttacttctccgccattcccgaggatgcggacgaagacaccaccgtggccatgacctatcaggacgctgtggcgtatatggaagaaaacggctttgacgagcccgatcccgctgattacggcgtgtgggtgcccggcattcccgtgctgatcgagaacggtctggatagcatcggctgcgcggactggctcaagggtctgattctggatggtatcgtggctggcgttggcgccgtgctgggctttgtgcctcagatgctggtgctgttcctgctgctggccttcctggaagcctgcggttacatggcccgtatcgccttcgttctggaccgtgtgttccgtaagttcggtctgtccggtaagtccttcatcccgatcctgatcggcaccggctgcggcattcccggcatcatggcttcccgtaccattgaaaatgagcgtgaccgccgcatgacgatcatgaccaccaccttcatcccctgcggcgcgaaggttcccttcatcgccatgatcgccggcgctctgttcggcggctccccctgggtctccacttccgcttacttcatcggcatggccgcgatcatcatctctggtatcatgctgaagaagtctaagctgttcgccggtgatcccgctcccttcgtcatggagctgcccgcttatcactggcccacgctgggcaatgtgctgcgcagcatgtgggagcgcggctggagcttcattaagaaggccggcaccatcatcctgctctccacgatcttcgtgtggttcaccacctacttcggcgtggtggacggctccttccagatgctgagcgaggatcagatcgaccactccattctggccgctatcggcaacctgatcgcctggatcttcacgcctctgggctggggcaactggcaggcggctgtggcttccatcaccggtctggtggccaaggaaaacatcgttggtacgctgggcatcctgtacggcggcggcgacgcttccgtgtacgccaacctggcgcaggccttcaccggtctggctggctactccttcctggtgttcaacctgctgtgcgctccctgcttcgctgctatcggcgctatcaagcgggaaatgaacaacgccaagtggacttgggcggccatcggttatcagtgcggcttcgcttatgtgatctccctgatgatctacaacatcggcctgctcttccagggcacgttcagcttctggaccgtgatcgccattgcgctgctggcctgcatgatctacctgctggtccgcaagaatccctatgacgacgagcatctgactcagaaagtgagcatgtaacatggcaacggcaattgtcgctctggttcttctcctgatcgtgggcgcgatcgtgtacggtatggtgaaggataaaaagaagggaaagcattcctgcggcggcgattgcggtaactgccgcggcggatgccattgacaaaacctccggggatgcgggaagattcccgcatccccgttttatatctgcgctttgcggaagagaggaggagccccatgtccgtctcgctgatccgctgcctgctggcagtactggccctgtcggaaacctgcgacgccgtcgcttcgaaggacgtggcccatctgctgggggtgaagcggcccaccatccaccgctcgctgcagctgctggtggaaaaaggaatgattgaaaaggaattgtacggcgacgtcttcctgacggagaaaggccgggctatggcccgaacgctggagacccggcgggatgacctggccctgctgttcgcacggcagtttggactttctcccgaggaaagcgtcaaggcagcctttgctttgatgagcgaactgagcgacgaaagtctggaaaaaatccattcctgaagaaaatcccatggccccgcctactttggaaacgaagcggcggggctttttgcatggctcggtacgccggttgcggcgcaggatccggccgatgaaaagcccataaaaacagggcccgtttgcgcgaacgggcccctttgcgtatggaaaatgaaagaatcaggctttttcgggggcgggagacggcgattctccgaattgggcggacagaatgcgcatccggcggtaatagccaaagatgaggaagatggccgcgccgatccacgcggaaatttcagcaaaatacacgccccattcgccgatgagcaggggcagcagcagagcgttgccgatacgcatcaccagctccaccacgccggagatcatgggggtcacggtgtcgcccagcccctgcagggtggagcggtagacgaacagcaggtacagcatgaacagccccgcgctggccacatacagatagcggcagcccacggtgagcacctgctccactagcgcgggatcgtcgttgatgaacagggacagaacggagcgcccgaacaggacgaccagcagcgcgatcaccagcgccatgcctacgccgatctgggcggaacggcgcagccccagccgcacccgatccagctttttcgcccccagattttgcccggcaaaggtgctgactgcgctgccaagggagttgcccgccagctcgatcaggcccgtcagccgggtggccgcattgaagcccgccatgaagataaagccgaaaccgttgaccacccgctgcagcaccagcccaccgatggagatgatcaggttttggaaggcaattggcacgcccagggccatcaatttgcgcatcattcggggatcgggtctcaaatcggcccgtgttatccgaatgaccggcattttccgcagcgccagcaggcagatcaggctgctgagacattgggacatgacggtggcgatggaaacgccgttcacgccccaacggaagaccgccacgaacagaatgtccagcccgatgttgcaaagggcggcggtggtcatggcgatcagcggcgtgcggctgtcgcccagcgaacgcagaaagccggacagaaggttaaacgacatcacaaataccacgccgccgaagatgacccgcaggtattggcaggtcagggcgatggtgttttccggcgaacgcagcgccgtcagcatgggccagagcagcagctcggacagcagcgtcagccccacggtgatggccgcggaaagaagaatgctctgcccggcagcccgccgcagcccggcataatctccggccccgaaggattgagcgatctggatggaaaagccctgcgccatgcccatggccagccccagcacggtccagtccagccaccccgccgccgataccgccgccagcgccgttacgccctcgacccggccaatgaccagcgtgtccaccagactgtaaaactgctgaaatagattgcccgcaatgatgggcagacaaaaggacaggatcagcttcgtcggattgcctcgcgtcatgtcccgggttcgtgccgtcatggtgtgccctccccaaaagtaaaaatgaaacgtgactacattcgcttcccgccgcccgattcctgccaggtggatgaaaatagttttgcattctagaggttcttttggggatggagcagcttttgattgcttttgtgcaaagggtagagtgggcacaggaactcctgaaggaaaattggggcgagcggaaagccctttggtgcgcccgcaggcgcatacccctgccccggggatgacgcgccgactacggcacgggagcagggcttgcagctctatggggcgttcacacttttctttcgatggcgaaagaaaagtgtgcaaaagaaagcc

SEQ ID NO: 4541 - DNA, 9901 bp, Unknown
  16S sequences of unknown bacteria
gtttttgaaccccacgcctagcgtggggttttcgttatacaaaaaataacacggtgcttgccgtgttacttttttgccgcagcggtgattttctcttttcaagcgcgctattttgcggtatgatagataaaaagaacaccctcgccgccctgggccatccagggtgctgggtttttgggggaaagggaagcacaatgcacgaaattctgaccaaaacgatgatgccgcctgccgacgggctctgcggcctgctgcagctgctggaagccggggcaactgcccacgctgacctctggggctgcggccgccagacgatgctcgaacgctaccgctgcgcctggatgatcgcgcgcggctgggcgcggattcatcgccccatcctccgcgcaccgctgaccctgcgcacttggatccgcccggtcaagcacggtctgtcccgtcgggagtttgacctgctggagggcgatacgctgattgcggaagccgtccaggcgtggattctggtcgatctgcagacacgccgcatccgcaccatggatgatatcccggaaatgcaacgcttccccgcccaagcaagcggcaaagacgcaccgctgcgccgcccggcaatgccccaagcgctggagccgctgggcaccgtcacggttcgggcggcggatattgattgcaacgggcacctgaacaacgccaaatacccaaactacgccctgtccgtcctgccgccccggccagtgcagcagctggagatctcctactgccatgaatgcttcgccgggcaggcgctgcagatcttcggccaagctacggcgcaggaagcctggctgcagggccgcgtcggtgcccaggtcagctttgatctccacaccatctttttccccgacgaacaagaaacgtccttgccaacgcaagcgcaaaaataacgcccgggaaacagtaagcgcgtcttgacgctgttccaaaagaatgatacaatatgccatgtgctttgccgctgtggtggaattggtagacacaagggacttaaaatccctcgccccaaaaagcgtaccggttcgagcccggtcagcggcaccagcccctgtggaaggaatctttcacaggggctttttcgtcttaaaaacgcgcctgcggtatagccgcaggcgcgtttgttctagtgttattccattaaaatccgttcaaaagattttcgtccagttctcgttcgggcgggttccggtgtattcgtgggcgttggttgcttcgatgatctcgtagtagtaccaggccgtggggtcattgtcgggccaggcatggtagctcaaaagcgtgctgccctggctaacgccgcggtccaggacgcggttaatgatcgccatcgcatcggcccgggtgatgctgcggtcaggctggaaggtgccgtcggtatacccggagagccagcccgcctgggtggcggtggcgatgcaggcataggcccaatgactggccgggacgtccgggaagctgcactgctcctgctgcacgccaataaagcgcaccagcattgcgacaaactccgcccgggtgatgctgcggtcgccgtcaaacgtgccgtcggggtaaccggcgatgtagccgccctttgtcatcgtcgagaccgcctcgttataccaggtactggcgctgacatcctggtacgggttttgcgtcgtgtgaatttcagcacgccgctccttcgtcagcagctggtagagcatggtcgccgtctctgcccgggtcagcgcaccgttgggacggacagtcccatcgggatagccgcagacataagccacatggtccttcccgttgagatcgggcggcgcggccttttcataattgcggaccatctgtgcctgctgctttgcgccgtcggggtcatcccgcagcagcgcggcgcgctgcaccgggtaggccgtatccggcgtcgcgtagccctccggggcggacagctcccggtaagtaagggaatccgtctccgcgatctcgttatactccgcctgcgtcagtgtaaacaggacatagccattctggccggatgtcgcggatgcgatctgcttttcattgcaaaacaggccaaatttcgcgtctgccagcgggtcgcccgtctgggcgtccaccttgtagagcgccagcgtgtagctgctgggaagctccttccagtagagccgcgctgcattggcaaagccctcgctcccgatgatcagccccgatctacggccaggcaaaaagctttcttcgtactcgggcttctcatttgtcgggctgttgatggaaagcggcccggtccggtacagctgcaaggtaccggcgatggacgccgtgacacgcagactgcggggcgtgcggtttgtgtcctcgtcggtcagcgcatttttcagccgcaggcgaatgccggaaagatccagggtatcgcccggcgtcgcttcgatctcggcgcccgtgtttttgacgcgcaagtagatggtgatctcatactcaccagtctccttccgcagcccaagctcgacagcgctttccggatgcccggcctcccattcatccaattcaaaccaggcatgctccagcttgagcgcggcaaagttctcttctgtcatctcggcaaaatcgtcctgactgcagcgcagctgcagacggaagctggagccgttaatataacggctggatttctccttcagcgcagcccagagggtctggctctcccgcagcgtgagctcaccgaggttgttctttccgctctccgtcagcgtcagggcattcaaatcgacggacatccggtagttgacctccggctgctggaccgtcgctttatgggcggcggaatcatcgccatcccaatccgccgcgtcagactgggcgatttgatgctgcagcgtcacgcccttggcctggacatcgaggtccgattttttgtaagtattgaccacgtcgacctgggtcacgccgtcacgcaggatcataggaacatccggcttgcctgcttcactgctccagacgataggcgtccggctgtcgtttacataatattctaccttttccagctcatagtcgccgatataagcaatgttgtaaaattcctcacccagggccagatccgtcccggggacgagataggcgccttggggattctgcgtctcgccgcgccagaacggggtgggcgatgtcagatcccggtaggcctcgatcgaaccgtctcgcgctgcctggccgttgagcaggaaggaataataccccggcagattcataacctccggcgcgtcatccggcaggacgatacgattggtgaccaccagggtcgctgccttggcccagatggcatacagggtaatattcccgttgattgcctctgccaggatatccccctcctgatagcttttgccgctgccgtcggcagccgtgttccattctttgaagacgaaaccactcttcgtgctgaagagcagcccccggtaccaaaccgtgcagttgttgccgacggacggcatgaccttcgcctgctcgcccgcagtgtaggcaagatacaggggcacaggattcaattcatccaaatacaaatgctccggatcattgggctcgtacgtgaccgtacacgggccttcgtctgccgccaaagctgctgctggaagcagcgccagcaccaggcagagcgtcagcagcagggccacaagggttcttcctcggtgtttcatggttctgacctcgctttctgcgtcatttcttgcgctctcattatacagcaaaaggccccggaaaaccggagccttgcagaaatgtaagcggaaaggtcattcgtagcgtggggagatatagcggttctctgaatctggctgaggccgcatgtggatcccggagacgacgcccatggccaggtacatcgtgaccagggagcttccaccgtaactgataaagggcagcgtcagaccgatgaccggaaaggagccgacgcacatgccgacattgatcgccacctggaagaccagcatcgccgcgatgccgatgcagatcaggcggttcatatagtttttcgtcttcagccccacatagacgcagcggacgatgattgccgtcagcagcagcagggtaaacaacgcccccagcatccccagctcctcgccgatggcggaaaagatgaagtccgtatggtcgttggccaggctcccggcttgggtccgggcgccgtggaacaggccctggcctgtcagcccgccgttgtttagagagagcatactctgcttcgtatgccagcggaccgatgtcccttctgggtcgatggtcgggtcaaagaccatggcgatgcggtttttctggtcgtcgcgcatcaggtatttccaagccagcggagctgctgcgccggcggcagcaaagcccgccaggaaccaccgcagcttgacgccgccgacaaaggccaccaccaggaagatgaagacatacaccagcgcaacgcccgcatccttcgacagcaccaggatcagcagcacgataaatgccacctggaagcccagctgcaggatcgatcggggcgcactgagcttgcgctgattggtctgcatcgttttggcaagaatgataataaacgggattttgcacagctctgccggctggatattgaacggcaggaacgggaaggaaatccaactgcggttgcccgtcgtcccctcgatgccgaaggggacgagcagcagcagaaacagcacattgaacaaaaacagcagatgccaccgctcggcgaaaatatccacatccagcagcgtaaacgcaatatagcacacgatccccagcagcaatgccaaaagctgccgcaggacatagccgccactgcccatataattggtcgcgctggcgatgatgacaatgccgtagaccgatgtcaccaggcacaaaagcagcagcaaaagatcgcccttttgaaagaattccttgagctttcgcatcagcttttgcattttgcacccctcccatcggcccgcagctgcgcggaaaatctttgattattgtaccattcccgctaaacaaagtaaatattagttttgcaaaaagatggggaatatggtatgatgttcataaagcaaccgccgcggctcgtttttttgcgccccggcaggcaaatgggggcagaattatggactatacgacccgctcgccccggcagacggagcagctgggccgtgcctttggcgcgcagctgcagccaagcgatctcgtcgccttttacggcggcctgggcgcgggaaaaacggcgtttattcggggccttgccgcggggctgggcatccaggaaccggtgacgagcccgacctatacggtcgtcaacgaatacctctccggccaggtgccgctgttccactttgatctctaccgcctgtccggcgcggacgatctgttcgacatcggctgggaggactatctccagcgcggcggcgtctgtgccgtcgagtggagcgagaacgcgccggaagcgctgaagggtgccatcgaagtccggatcgcgccgggcacagacgacgaaagccgaatcatttcaatcaccggaggcgaacgctttgcagatcttagcgattgagacctccgccaaagccgcctctgccgcgctggtcgcggacggcgtgctcaaagcggagtatttccaaaacagcggccagacccacagccggacactgctgaagctggtgcaagacatgctgcaaaactgcgacacacctgtcgctgcgctggacgccgtggcctgtgccatcggcccgggcagctttaccggcgtgcgcatcgggctggcagcagccaagggcctgtgctggggcgcagatctgccgctgtacggcgtctcgaccctggcggccatggcctacggcgcgggcctgccagacgggctcatctgcccggtgatggacgcacggcgcagccaggtctatacggcgctgttttgcgcagagggcggtaagctccgccgtctggcagaggatcaggccatcgcgctggcagattgggccacgcagctgcgcgcttacgcgcagccgatctggctggtcggcgacggcgctgcattggccgccgaggcgctggccggggctgggctttccctgcttgcgccggagcatctgcgccagcagcgggccgcaggggtcgccctggccgccctggcagagggcactgtgcaggacgcagcctatattacaccgaattacttgcggctcccccaggcagagcgagagcgcctggcccgcatgaaagataaaaaggagtaaaaagatgggtaagatttatgtattggatcatccgctgctgcagcacaagctgtcaatcctgcggaataaagacacgggcgtgaaagagttccgcgagatcgtcggcgagatcgcggccctgatgtgctacgaagccacccgcaacctgccgacggaggacatcgaagtcgagacgcccatcggtctggcccacacgaagatcctcgccggtaagaaaatggccatcgtcccgattctgcgggcgggcctcggcatggtggacagcatcattgatctcattccctcggctaaggtcggccatgtcggcctgttccgcgacccggagacccatgagccggtgaagtactactgcaaaatgcccccggatatcgcggaacggcaggtctttgtcgttgaccccatgttggccaccggcggcagcgccagcgccacgctggatattctcaagaaggaatacggctgccacagcctcacgatgctcaacatcctggccgccccggagggcgtcgccctgatccagaaggagcacccggatgtcgacgtcttcgtcgcagcagtcgatgaaatgctcaacgaaaacgcctacatcgtccccggcctcggcgacgccggcgaccgaatctttggcacgaaataaaagcaatgcattccatttacgcagcggcacctagtttggtgccgctgcatttctttcttacaaggttctcccttcacgccatcgggtgcgccaaccattgttccagctggcggcagcaggcttcgctggctgcggtgacgcctttgaaatcgacgtggggatgcatccggcgctcgatagcgtcgtgcagggccttggcctcctgcagctcgggcacagcctcggcgagaagacgcgtcatcatttggcgcagatatcccgcctgacggctggctgcgggcgagatctggaccagggcgtccagatccagcggcgtcgtccccaccagatcgcaggcgaagtgactgctctggcggacgaaggccgtcgccagctggggcaggtacagctgcgccgggccgccgtccgggtctagtgggctgtaaccggcaatgacgttctgccccgcatccagcgccaaccgggcgatctcctgcagatacctgccgcttaaatggcagctgtccagcagcagatagatcgtcgccgcagactggaacatcccatagcggctgatgcagcccgacggcgtgacgccggtgaaaaacagctcccgcagcatcccctggccccggccgccgcgcagcagaggcgtcaggagcatcccggccgccgccgtcaggcggtctgctgcggccccctggtctaccagctcctcccgcaggcggtacagcgcctgcaccgcccgcagcgcctgccgggcccggcgatagcacgcctgattttccgcctgcagttgcccaagctcctcccgcataggcgccagcgccgccgcgtcgtaaaagcggcccaggtcaagatatacgccgtcgctgccgcataggggcggctccgcggcgtggggcggcgtcgcatcgcagaccgccagcccggcctgctcaatcagcagcgtatccaaagaatccgggtccgaagagcacaggcccagctcacagtccgcctccaaatcggcggcagtcttggccaagcggcgcatcagcgtcgacttgccgcagcccggcccgcccttgagataaatgcgccgccggacccgcggatcggccattacggcggagaagcggttaaaaaagccccggggcgtattagcgccagggaaatagacgatggacataggcaaacctcccaaaaagaactcatactatgctatgccgtaccgctcccaagggtgcggctttttgtttgtcgtatgggcccctgatgaaaaaatttataaaatgccccgtctgctgcgctatcttatgcaggaccagcacagtaccaaggggcacaatgcaaagctttttgcgtagtgggccagcttcccgtagcacaaaagctgaaaaaacggatacattggcataggcgactttttggaaggaggcgcaagcatgttacaaaactgcgtgccgctggacgcgctgcggcccggccaacacggcacggtggcgcagctccggctccagggggcactgctgcagcggctgctggacctggggctgacggaggactgccccatctcctgccgcctgcgcgcgccggcgggagacccggcagcctatggcatccggggcgcggtcatcgcgctgcgcagcgcggatgccgctgggatcctggtacgattggagggaacaccatggccggacgaaacagcgcggcggatttcaccgtcgccctgatcggcaaccccaatgtgggcaagagcacgctgttcaaccgcctgacgggactgcgccagcacaccggcaactggtccggcaagacagtcgagcaagccgagggattttatccctataaaggcaagcgctaccgcctggttgacctgccagggacctattccctgcgcagccgcagccgcgacgaggcaatcactgcgacctacttacgccagcagacaccggactgtgtccttgttatctgcgacggtacctgtctggagcggaatctgatcctggtgcagcagctgctggggctgacgacgcggctcgtcgtcgcggtaaatcttctggatgaagcagcacgccggggcattgcgctggacctgcccctgctgcagcggcagctgggcgcaccggtggcaggcatcagcgccggtcatggcaccgggctgccgcagctgcaggagctggtccggcaggtctgccagggctatctggcctccccgggggatggcgatgcggcagcagacgcccgccaggaggcccggcgggccgggcagattgcccgcatgaccgtccggcagacggccacaccgcaggcgtgtcgattcgaccggctgctaatgcgccgggggtttggtgcggcgttcctgctttttcttctgctggggctgctttggctgaccatcgccggagcaaactatcccacagcagcactgcaggcgggctttgacgccctgggccggtgtctggagcggtggctccagggcctgccgccgtttttctttggcctgctgacccagggtctttacgctacggcagcccgggtcatcgcggtgatgctgccgccgatggcgatcttttttcctctcttcacgctgttggaggacgccggtctgctgccccgggtcgcctttttgctggaccgtcccttcgcccgttgcggcggggagggccagatggcgctgccgatgtgcatgggcctgggctgcaacgccgccgggattaccggctgccgcattctgagccccggccccgcccggacagcagccatcctcacaaatgcgctcatcccctgcaacgggcgcttcccagcgctgatcctgctggccggaatgctgctgggtgcattcgggctggactctgccttagcgcgggccactgttttgctgctggccctggccctgtccgtcgcggcaacgctgctgctgtgccgctgcatcacagcccacaccagcagcgcacccaacagctttttgctggagctgccgccctatcgcaagccccggatcgggcaggtgctggtccgggcagcgttggaccggacgctgcgagtcctgggccgggccgtctgc

SEQ ID NO: 4542 - DNA, 24005 bp, Unknown
  16S sequences of unknown bacteria
cagccccttgcaaaaactcgaaaaagtggcctaagccactttttcgacacgctcagacccccggcttttgccgggggtctgttctcattttgcccaataaaccacggcatcccgcaggaagcgggcgcagccgggaaggtgtttgtcgtagtaggcggtaaagcgggcatccatcacatacagctctgcaatcccccggtgtttggcgggatcataccggttgcctgtgatggtgagccaccggcggtggagagtacagatttccttcccctcctggctttccggctggaggccggcctggacagcggcctccagccggtcctggatctcctggcccaggttagtccactccctgtattgctccaaggtcagattcatcacggcggcgttggcttcatccacttctttgtcgccgtacttgctgcggatctcctggccgtaaacttcttcgttatgggcgatggtctgttttttgaaggcttcaaactttttctcgtcctgcataaattccttcctttcttctgcccggatggtgtctttcaccgattggatcagctgttccagatgttcccgtttggcttccagtgcagccagatggcgttccagagcggccagacggtcaaaggagggatcgtccagacattctttgatccgggccagctccaccccgagagcccggtaatagagaatatcctgcagccggtccacttcggcccggccataatagcggtagccgctttcggcgacccggctgggcttcagcagcccgatctggtcgtaccagcgcagagtgcgggtggtcaccccggacaggcgcgacagttcctgaatggagtactccatgaacatccctccctgtgaataggatagcagttgacggagcgtcagagtcaagaggaaattttatatccggcggattgtttgctgcaaccggtccagaaaggccgcggccggaacgccatccatctgggtgtggtgaaattggaaggagaccggcagagtagtgcggaaccatttcttccggtatttgccccagaggaaaaaggggttgttatagcatccggcgtagatgtttactgcgccgtcaatttcgtatttcgccagggaggaggtgccgatcaccatataatcttctcccagttcgtagttttccccactttcacgcaccgtcacggtgagggctcgataatcctgatggaactgctctaaatcggaagagagcggaatatcacaggtggcaatgctgccattttgagtgaccaccaccacattgatggccagctggtcatattgcatcagtttgtctcccacggggagaaggtaaaattcctctgtctgcatggctgttttcccaatgcaccagcacagaagcatattgaatgggtagccccgtttccggctcaggtgcacaagcggggtcacatccagggtttttatcagggtgaccatgggcataggggccttcatccaaagctggaaggccaaagcccgggaggtgcttttgggatcgacttctttcatattgttctccattctgtttgtttggtggcgataaggggcctttatcatatcatagacttttgcagcaggcaaccaatccccgtagtttatagccgggagttatggtataatatcaacagttgccgcacatgtgcggcaggatgctgcgcattcagtcgttttgcctgcaaaacgactgctgttgatgttacaccctagcaaaaatcagcaaagctgattttacgccgcattggcggcgtgcaagtctgcctggacttgcagctatggtataatagccgcaaagcagacaggaggtgcaggatgcggattcttttgttgggcaacagcttgacaacggccaatgggatgccccggatgctggctgaaatcaccggggcagaagtggtctgccacacccggggcggggcccggctggcagagcatctgaagggcaacaccaaactgggcgccaaaacccaggcggctctcagagaggaaacctgggattatgtggtgctccaggagatgagccatggcccctttacggcaaccgagcgcttcttttccagcgtagagcgcctttgcagccagatacggcagcatggggctgtgccggtgctgtatgccacctgggcctatgaaaaaggcggcagcaagctggagagcaaaggctgggattatgaagaaatggccagagcaatgtccgcagcgtacagcaaggcggcccgggacaatggagcccttttggccgatgtgggcgggcggttttatcaactgagccaaggagagcaactctatgccgtcgatggcgtgcaccccaatgagcaaggctcccgtcttgcggcggagaccatcggccaggtgatattggaacacaaggagaaagtgaaatgattcgggaaatctgcaaagacgaagtatttttggctcaaaaggcagagctggctaccatagaggatctgcccgttgccgacgatctgctggatacactgagacaccatcgggaaggctgcgtgggcatggcggccaatatgatcggtgtcaacaaaaggatcattgcctttgatgacgagggcacatacatggtgatgttcaatccggaaatcgtgaagaaatccgggtcttatgacacacaggaagggtgtctgtcccttgtgggtcttcgcccggcccgccggtttcagtccatcaaggtgcgctggcagaacgaaaagttccaggagcgtctccgcacctttaccggctggatggcccaggtcattcagcatgagatcgaccattgtgaagggatcatcatatgaatcaaaaccccgtgaccctttgctttgcagggaggtgaccggatggagctgggactgacctttcctttgcagcggtttttgaaaatgaaaccgcctctttacggcaccgaaccggacaggcggttttgctgggatgtgcacaacattcgccttcgggaccgggaatgtatgctggccgttcattgccacagccggtatgcctttgtgctctgggatgtgagcccttttcagtggggagatatcaccgggttgtttcgggagggattggcggacagcctgcacggggctggatttgcaccggaggcggtggataggtatcttcagaaagccggggatattgatttgacccgcacccatggccggcgggaggtggccttcctcaaccgggcctgggaggatgtgctggcgctggatctgtgtttggacacctcccggcaggcccagcctttgctggatcaggccgtcaacacctaccccagccgatgcgcaggagcagagggattgggcctgcccttggagcggatggaagagatactatataatatataaaaggaatgaaaaatttaaagatggaacagcacaacgggcaacagaaaccaaaagtggcctttctttgtgtccacaactcctgccgcagccaaatggccgaggccctgggggaaaagctggcgtccgatgtgttcgaaagctattccgccgacacagaacctgctgcccggatcaatgcccaggcggtgcgcctgatgcagcaggtgtatggcattcagatggaggagagccagtacaataagcccctgtcccagctgccgccggtggatattgtggtcaccatgggctgcaatgtgcagtgccccacgctgccctgctctcatcgggaggactgggggctggaggaccccagcgggaaggaggacagcgccttttttcaggtgatggatcagatcgaggaaaaggtgctggacctgaaacggcgtatccagcggggaaagctgggccaataaaaagagaacgccccgggtggcctgtaggaaaggaacccagggcgttttttcattgttcaggggatggagtggggctgcgcaggattttttccaagggtttgccgcgggccagctcgtccaccagcttgtccaggtaccggatctcccgcatcaggggatcttcgatttcttccaccttcacaccgcagattttgccggtgatcaggaagcggttcgggttcatggccggggccttgcggaagaaatccccatagcagatgtccgactgttccatctgagcgatctcttccggactgtatccggtgagccagctggtcacctgatccacttcctcccgggtgcggcctttcttttgggccttgctgaccaagaggggatagagcttggaaaaaagcatttgcgtcacatcggtgcggggcatgggggacacctccttgcttgatggcttcatcataccacggaagaggggccggaacaaggggattccctgatgcaaggatttttggtaaaatagcggcaggaaacaaaggggggaagcccatgaaaatatggaaaaaaggactgctgattctgacggcagcggctttggtggccggagtgttcctggtgcggcattggtttgtttcctggccgctgcggtttcagggggaactggatcggtttttcggggagggggcgtggcagtgcatctcccaggaggaaaaggaaagccggatgtattcggtgatcgaccgctccaatcccacctacaccacaaaacggccaggggaattccgggagtggaacatcgcctttcaaacagcccagggagaaaaaatggtatggaccatcagcgaccacaccatgcgcatcaaccacagcaagcactttttgctgagccgggagcggtattcggcccggcaggctctgacgctggagctgatgcagctgtcttttgctctggccggggagaaagtggggcagcaggtgttgggccaggtactgccggaggaggagctttcctgcctggaggtggatatttcttaccatgggggcaatccgcctccggacttttatgacgatctggccggagaagagtggttcacttcccaaaaggccacggccgcctgctatctggaaagcgatctgtatgatttttatatcagcgttcgggcccatgactaccgggtggaaaagctggaggagagccagcgccagcatcttctcagttccctggaagagctgtgccaggctttggagaaggaatacggcgacaacgccaagtacgacatttatctgggcgaaggcatcacagcggaaaaagaagcgtagtccggttaccatcgaaaagccccggccattttggccggggctttctgtttaggctttgacgggttcttcatttgtttggatggttttgccggagagaatgcgggccaggaattttttggtgcgctcttccttggtgtggttgaacacctcatcaggagtgccttcttccaccaccacgcccccatccataaagatcaccttgtcggcgatgtcctgggcaaagctgagctcgtgggtgaccaccagcatggtgataccccgtttggctacattcttcatcatttccagagtttcaccgatgagctccgggtccagagccgaggtgggctcatcgaagaggatgatgtccggctccatggcgatggcccgagcgattcccacccgctgctgctggccgccggaaagctgggagggatagtaatcgtgcttgtccgacagcttgacccaggccagggcctcttctgcctttttccgggcctctgccttgggcattttcttcaccaccacaagcccgtgcatcacattctgaatggcggtcttgttggcaaacaggttgtagttctggaacacgaaacctacctttttccggatctcccggatctcacgctttttggcggaagaaaaatccacttgggtgtcgcccaccaccagctggccctggtcggcgtgctccaggaagttgatgcaccgcaaaagggtggtcttgcccgatccgctggggcccaggatgaccaccacctgatgggcgtccaccttgatggaagcccccttcagcacttccagatcgtcaaatttcttatggatattcttgatctctaacataatcgtttccccttgcttataccggcaggccgtggtccatcagggaccgcacatatcccaccgtcacttggacacccatgtccagggcgtcctcatcgatgtcaaaacgctcgttgtgatgttcggcgccgcagcccttttccaggttttgaatacccagcagagccagcacaccagggtaagcccggcaataggtggaaaagctctctgaggcataccacaggggaaactcctggggaacggcggcatcgccgtacagatcccgggccacttgccgggcccgctgggcatggggagcgctgttgatcaccggaatccccacatgatccatcacccggccgaaggacacctgacagccgtgaatggccgccatgtgctgggcggtgtttttcaccagatccatggctttctggccctcttccaggtcgaaaaaccgcatgctgccccggatacgggcggtctcaggaaagacattgaaggtttcgccgccctggatactggtgatgccaaaggtcaccgtcttttccacattcaactggttgacaaagacgccgggcagggtggagacaatgtctgcggcggcaaacaccgggttgcgggacagatcgggccgggagccgtggcctcctttgccctggacggtgatgtccatcccgccgaagccagccatgcaagcgccgtcccggatgccgatctgacctgagggcaggggagagtacacatgaatggcccacacggtatccactttccgatggcccagggcctccaccatttgccgggaactggtgcccacttcttctcctgcttcaaaacagaaatacagggtgccgttcagcgtatctttttgctccaaaagcacttccatgctgcccaaaagcatggcggtatgggcatcgtggccgcaggcatgacaggtgccttcctgctgggatacacaggtgcggggacctttcaggttctccgggttttcctgcaccggcagggcgtccatatcggcccgcagggcgatgtgaggcccttcccggccagtgtccagagtggccagaatggctgtttcggtgaccatttcatagggaagaccccattttttgatgtattccaggatgtagtcccgggttttgtattcctgaccacccagttcggccaggcggtggatcgtccgccggtgggcgatcacagtgtctttgatttggtttgttgtcatggtttcgccctttctttttggtgtatcaggctgttgtgcgcttgtggctccggttcagataggcctccagcgtgcgcccggccttttcgatcagagcacccaggcaccagaagatcagggccgccgccacataagcctccaaaaagcaataggaatcggtggcggcgtcggtggcgcctttgaggatgtcgctgacgcccattacattcaccaaagcggtggttttcatcagggacagggtggagtttgtcagcatgggcaccgtcacccggaacagctggggcaggatgatgtcccggaaagtctggaaagcggtcatgcccacggcgtagcccgcttcaaactgtcccttgggaatggccagaaggccgctgcgcatcacttcggacaaaccgggcagggccacgatgatcaaagcgatgatggcaatgtagatcaggttcacatcccggatggtgatatccagatggagtaaggcgatgatgtcgttgaaagtataggtataggccatcacgcagatgagaaggatcaggtttgcggggaaggccttggtgagggccagcagcacatccagaacgggagccagcaccggcacccgatagatccgggccagcgcaatgaacagccctatcaccagacagatcaaaagggtggagaaacacatgatcagattctgggggatcttctgcaccgcggcttccagacacatccaaaagtattttgcctgcatctcaggcacctgcctttctctggattccgtagcggtggccaaaggccagcttccggttgataaagcggaagagcacctccagcgccaggctgatgacggcaaacaccatggcgcagcaaatatagccctccagcagatggccgcccatggtggccaggttccgggccttgccgatcatatccaccacattcaccatataggccagggcggtggcctggaacaggccgatgaacatattgcccagcatgggcagggagattttcagggcctggggcacgatgatgccccgcatggtctgaaagctgctcatgcccaccgaaaaaccggcttccatctggccggccgggaccgccagaatggaagcacggatggtttcggagagaaaggcagatatgttgatgctgtaagcgatgtagacgaacacttccggccgccaatcgtaggcgtcgatgccgaatttttgcagcagcaccggcaggccgaaatagacgatgaacatctgggtgatcaccggcgtacaccgcacataggacacatacagcttgagcagccaatcgatggcccggatgtttttcagccggagcagggcaatgccgaatcctaaggcaaaactcaccacaaaaggaatgaaaaccagctgcagtgtcaccggaaatttgtcgatgatcttgggaaaatactcaatgacatagctccatgaaaacatatcttttccctacttactcagtttttgttttgctatcggtgggacggaaaattactggggattgacggaatagtcctcgccgaaccactccacgcacagctcgccgatcttgccctcttcccgcagagccttgatggcggcgtcgaagtcggcctggaggtcggtgttgccctttttcagcagagcataggtgccgcagtcctcttcgtcctccaacaggggaacatcgctcatttccagatcggcatcgggataggcatccagatatttggttttcaggtcaaaataggtgtgggtatagccgtcatagaggccgttttcgataccggcgatcatggcttccaggctggggaaggtctcctggaggatgatggggttgtcgggatgctcttcgttataggccaccagtgccttgccgatgttgtcggtgggggcgttggccatggtcttgccggccaggctgtccagatcgctgatgtcggtgcggccggccttgtagatgacccggtagctgccgaagtacatcagggattcttcagaaacggtgtatttctcggcccgctcatcgctgtaggccatgtggtgggaaaccacatcatatttgccgctttccaggcctacaaacaggttgtcccagctgtcgcaaaccacttccacatcgtatttgtcgctcattttctcagccaccagctggaacaggtcatattcgtagccgtcgggctcttcgttctcattcagatagcagaagggcttgtaggcattgccgatggcgatggtgatcttctgcttgccgctgccgccatcactgtcctttttgccgctgtctgttccttcgtcgctgctgcaggccgccaggcccagcagcatcatggtggccagcagcagggccaatactctctttttcattctgttgctcctttgtgcataattttacggccatttgtccgcgattctcagtataaccttcctttcgacagaaagccaatcgttttttgtaatagaaatttaacgatttattcgcttgtttaataacttaacgggagggaagggagaaaaagggaaaagcccttccagactatggagaaacggaaaatttactaaagcgaaccgaaagccttggggtttctggcccagggcgttgtaagcatcgggaagaaacgatgtcattttttctgacggcgcggcagggtgagaaaaggagatgccttgttctctgaaaagaatattttttctctttttagtatttttatgtagcacaaagcaggggatctggtgtagaatagaggaaaaagcaacaaaggaggggctgtgatggacagccaaagggagctggagcagatcctgcatcagatccaccggcggggatatcccgcttacaaagagacccgaggggaataccggtttcccttttataccttgtctattgaccatgtgcagggggacccctttgcctctccctcccggctcagcctgcgtctgaccgggccgcaggccgcctttccccgggagctctatgaaacgccttgccgccgcatcgctttgcaggatgagctgatccgccgttttgccgccggggcaaaaaaagagagcttccgggtgaagggctcggggcacagcggcctgatcgctacaagtcagtgcacccagcaggtgctggagcgcaccgcctgccgcatcgatccccgcaccggtgaggtgcttttccggctggagatgggctttcccgccttcggccgcacggtggatggggatggcctgcgccggatgcttttggatcagcttcccgtcctggtgaaaaccagtctgctatataataaggagaaggacggagcctatttcacatccctggcccagatggccgacgaccggcagtatatccgggatcatctgtcagagcgggggctgtgtgcttttgtggcaaatggcagcattttgcccagggcttcgggggtgtcggaccggcccatggaaggggcggtgcccttcctctcgccgccggagatggaggtgtgctttgctctgcctcaccggggcgaaatccggggcatgggcatcaaaaaaggggtgaccctcattgtgggcgggggatatcacggcaaatccactttgctgcgggccctggaggatggggtctatgaccacatcgccggagatggacgggagtttgtcatcaccgacccttccgccgtgaaaatccgggccgaggacgggcgcagcgtgtggcataccgacatttccctgtttatccgggatctgcccacagggcgctctacccgctgttttaccacccgggacgccagcggcagcacttcccaggcggccaatgtggtggaggccatggaggccggagccggggtgctgctgatggacgaggacaccagcgccaccaatttcctctatcgggacgagctgatgcagcgggtggtgagccccggccaggagcccatcattcccttcctccagcgggtgagggagctgtatgaaaagtggggcgtttccactatcttggcggcgggaagctcggggagctttttccatgtggcccatcaggtggtgcagatggaccggtatatgccccgggatatcacggcccgggccaaggaggaagcggctcagtttcctctgggacttgctttggcgccggagggaaaagcgccggaaagccgccgggctccccggccttttgcacctttccggggagatcgggtaaaggtgcgcgccatgggccgggaggccgtgaccgtgggcaaagaggagattgacctgcgccagatggagcaagtggcagacagtgagcaatgcgccgcgttgggctatgcccttctctatgcccaccggcagctgctggatggccggtgcagtttgcaggaggccgcccggcaggtggaaaagatcatagaagagcggggcctggaaggattgtgccagggaagcgtgccttttctggcccggccccggctggccgaagtgctggcctgtctcaatcgtctgcggggcatggattgataacggaaggagcaaaaaagatggaaatttcagatattctgcaaatggatcaaggctatgtgggacagaacaggaacattccgccccggctgaaaaaacgggcccagagcctgtgctggcggtataaccagtccccgccgggggccgagggagagcggcggatcattctggaacagctgctgggcacctgtcatccccttacctttatcgagccctggttccgctgcgactatggcttcaatatccacacccacggcctggccgtgatcaattacaactgcgtcatactggacacttccccggtgcacatcggggccaacgcctttattgccccggggtgtgcctggcctgcgcgggccatgccctggacccggagcagcgccgggagggaatttccacctccaagcccatcaccctggaggacgatgtgtggatcggggccaatgcggtgatctgcggcggtgtcaccatcggccggggatcggtgatcggcgcgggaagcgtggtctgccgggatattccgccgggagtggtggcggtggggtcgccttgccgggtgctgcgcccggtgacgccggaggaccggatcgcattggaaaatctggctttttaaggttccgtgaggattttctgctcccttttttcatatactgaaaagggagtgacatgcagtgcaggaaaaatggagaaaatgggcgccttatgttgggtttgtgctgttgacgctggctgtgggcggcctttccggatggctcacccgggatggggtggagctttataaccagatggcgcaaaaaccgcccctgtccccgccgggctgggtgttcccggtggtgtggagtgtgctctatgtgctcatgggcctgggagccgcccgggtctatctggctccgccctcggaggccagacgccgtgggctgggggtgttccttttgcagctgggtttcaactttttctggagcatcctctttttcggcctgggccgctatgggctggccctgttgtggctgcttgtgatgctggggctgattgcggccatgatccgcctgttttcccaggtggatatcaaggcggcccggcttcagatcccctatcttttgtgggtgctctttgccgcctatctcaatgctggagtcttcttcctcaattcctgatgggccttgccctttgggaaacggtgtattatactgaggaaaaaggccgatacgatgaaaaacggccctttgagggccgtttttttctgcgcagggagcaagggaaggagtttgggagtatgatcctctattttacaggcaccggcaacagccggaaatgtgccggttggctgggggccaagttgggagaggaatgggtggacatcgtccccaccatgaaaaaaggggagtatggggcttttcagtcggaaaccccgtgggtcttcgtctgtcccacctatggctggcaggcgccctgggtgtttgtggattttctccgacgcagccggttcgagggaagccggcaggcctattttgtcctgacctgcggcggggagatcggcaatgcaggggagagcctgcggacgctttgccaggagaaaggttgggagtacaggggcgcggccggggtggtgatgcccgacaattacctggtgctcttttctcccccttcccaggaagagggagacaagatgctggaaaaagccaaatcccagacggacaagctggcggcactgatccgaaaaggagaggggctgccggaaaaacgctccacctttttcgaccggttgaaaagcggggctgtcaatcagggaatgtaccggtttttcatcaaagacaaggcctttcgcacccatggctgcgtcagctgcggcctgtgtcagcgcctgtgccccatgggaaacatccgcatggtggagggaaaaccccagtggcagggaaactgcatccactgcatggcctgcatcgctcattgcccggcggaagccattgaatatggccggcgcacccagggcaaaaaccggtggcattgctgagacttttggaaaaataaaaagccgcccccaaaggcggcttttttcacgggattcaggcccatcgtccacgggggagggtgcggcgcctttccaggtcataaagccgcaggaagggtgcgggatctgcaccggagcgcacatggcggaggaagatctctccgcaggcctggctgtcggagtcggcctcatggtggcgcaggggaatggcaaaataatcggccagggtattcagccggtggttgggaagctggggcagaagcttgcggctcatgcggcaggtgcacagataaggaaccagcggcccccaggagatgccgtagtccatgaggcatttggacaaaacccccaggtcaaagggggcgttgtgggccagcaaagtgcggccggaaagcagctcttccagctcctcccacagctgaggaaaggtgggggagtctttcaccatggccggagtgatgccggtgagggaaatgttgaaagggtcaaaatgagtctccggattgaccagaaaggagaaatttccggtgatgccggtttcgtccagcagggtgacgcccagggcactcatgcgccggttctggctgttgggggtctccacatcgaaggcggcaaatttcatacctgctcctccaaagcttccacaaggaaggtcacaggccggaagccgtcgttgcaggagagcatggccgagcggggatttttcatccagccgtcgtaaaaattctccgccccgtggctcagggccagcacaaatggggataggctgtcccaggcgctttggcagaaaccctccggcttttcccagccatttgcaatgtacacctgtcccacttccatatcacaggcgtgttccagcgggttttcgtactgggccatcaggtcggggtagcaggtctgtttcatcacggtgatccggcatttgtgcatgggaatccctccttatcgcagcgggatgattgtaccacaaaaccaggccgggagcaaatattgacggaggtttttcccggtgctacaatggcggaaaagaaaggaagtggaaaggtggaaaagccggaagggtatttttccgatctgttccagctgttctcgggaaaagagcgggagctggagctttacaataaggcgtttgccaaaatggaacaggcttttccccaggcccgagtgaaggtggggaaaagccaggtgagtttttatggaaaacatctctttgccgccttttccccgccggtgcgtcggaaaaaggattggccggagcactttcttctggtgactttcggcctgggagagcctttggcctctccccgtgtggccgtggtggtggagccctatcccggccgctttacccaccatgtgctggtggagcgggaggaagagctggacgaggagctgttttcctttttggctatggcctgggagtttggggaaaacaaggggcgaggaagcaaggctcctcatgggagaaaatgacccccaccgcctggagataggaatagaggatggtggtgcccacaaaggacattccccgctttttcagatcccgggacagggcatcggataagggggaggaggtcaggccacattcccggatgggagcgcccccggcaaaatcccacaggtaacggtcaaagctgccgaattccttctgaatgtccagaaatgcctgggcattccggacagcggcctggatcttccgccggttgcggatgatgcctttgtcctggcacagctgctctattttctccgggccgtactgggccaccttccggggatcaaagccgtcaaaaaccaaacggaaatgttcccgtttattcagtacacattcccaggaaaggcccgcctgaaagccttccaggatcagcattgcaaagagcttttggtcgtcgtgcaccggcacgccccactcttcatcgtggtagcggatatacaggggattttggggatttgcccaggggcagcgcgtttttccatcggaccagatcattgctttcaccagcttttcgttagcgttttcttcagaatatcatttttccctgtgtttcacaaggaggacagcatgatcaaagtgacagacctgacccgggactacggagaaaatcggggcgtgttcggcctgcgtttccaggtgcagccgggggaaccattcggccttctgggccccaacggggccggaaagaccaccttgatccgccatctgatgggatttctccggccccagaagggccggtgcactatttacggcctggactgctggaaagaccggaagcaagtgcagcgcatggtggggtatatccccggggagatgtccctgatggaggggatgcggggagaggactatctggattttctcgatcggtaccggggctttaccggggagggataccgccggctgctgctggaccggttcccggtggatctgaacaccctcatccacaagatgagcaagggcacaaagcagaaactgggcatcatcgccgccttttcccacaagccggaggtgctcattctggacgaacccacttccggcctggacccgctgatgcaaaaggaatttgtggatttcatcggggaagagggaaaaaagggccgggtgattctgctttccagccacatttttgaggaagtgcagcgcacttgccgccgggtgggtattctgcggcaagggaagctgctgacccaggacaccgtccgggagatggaagaaaaacacagccgccgctatgtgctccaggtggagaagggggatgcccaggcctttgcccgggatttcgggggaaccatcctggaagatggccgggtggaagtaaagaagacagccgacctggaagaaatcttcctgcgctgctaccggaagggggaaaaggaatgaacaagacgctgttctggcgggagatgcgtggatctttggggctgctggtgatttttggcggcgtgcttaccttgtatatcgtcatgatcgccgggctgtatgacaaggagacccagcaggccctccagcaattttacgatatgatgccccagctgatggcggcggtgggtatgaccggggaaggaggaactctgctctcctttctctccacttatctatatggtatgctgcttctggcctttcccatggtgtatgccatcctgcgggccagggggcttgtggcccggtatgtggaaaagggcagtatgtacgccctgtgcgccgccccggtgagccgcctttccctggcaggcactcagctggcggtgctcttttccacccagctggggctgctgctttactgtactgctttggaaattgtatcctgccaggtactctttcccggggagctggatatcaaagggcttctgtgtctcaatggggggcttttgtgcctgcatctgtgtctgggggccttttgctttctggtttcctgcctgggggaagggagccggtacaccgctctgatggccggtgttcccaccttgatgctggtgatgcagatgctggccaacctgggaggaaaactggaaaaattccggtatttgaccctgttttccctgttccagccggaaaagctgatggcaggggaagggctgcttgctgccgggatgctccttttgctggccgttttgttttccgccctggccctgtggggtttttgccgccgggatctgtatatatagggatatcgcaaaaaaagagaccctgagggtctcttttttactattatgctttttgaaggaaatccaggatgggctgcaaggtttcccggcgggtaaaatccagggttttgccgtaggtattcaggatttgccggtcctcttcggtcaggtccttctttttcagaatggcctggcgcaatccccacatcatcagccggtgaagaggggaaaggcggctgtaatccagcccgccccgcaggaaaaacaagggtgtgtcccgccggttttccggcagggccttttccacattacttcggatgtttttgcgggtgacttccaagttgggatcggctacgccgcaggtgaaaagaacccatttttgggactttgcgtgccgggtgagaaaggacaggccgcccatgcctccggcataaaggctgcctcccagcacaatggtgtcataggaggccagggatgcgggggagagacctttgacattccacacaggacagcccaggctttcccccagccactgagcatagcgctgggtgtggccatagcgggaggcatagagcaccactggtttcatcgcagcgttaccgccgtgccggagacgctgaccatcagcatgccgttgtcgctgcccagcacttcgtagtccacatccacgccaaccacagcgtcggctcccagagcgctggcccgccgctgcatctccgccagggcttcgctccgggcgttttgcagctcatcctcatatccggagctgcggccgccgaaaatgttccgcagccctgcgccgatgtcccggaaaatgtccacgccggagatcacttctccaaacacgatccctttatattccccaatggtgcgtccctctacggtaggagttgtggtgacgatcataaaaaagcctcctttgtttttgaaaatgtggagaaattataccacagttccggaaagagagaaagaggatggggcgaacattgtgcaaactagccaaaaattccctttcagaatccctcagcctgccccttgtggcgggggagtttgtattttatactgaacttacagtgaaaaaaagaggagggtgttttttcctatggcagacaaaatcatggaacaggcgctggagatcctgcgccaccagcggtattatgacagcatccagggcctgatgggctgggatctgtgggaaggcctttccaaaaagggccagccttaccggggcgaagtcagcggctatttcacccgccaggccctggccgagctgaaaagccccgagacccggaaagtggtggatgccctgaaggagcggaagccggaagattttgaggacatctatctgaaaggggccgcccatgagctgtgccagcggtatgaccgggcggtgcaggtgcccgaagatctccaggtggaagtgcgcaattacaccggtcaggcccagatggcctggcgggatgctttggataaaaacagctttgaattttataaacccaccatcaagggtctgtttgagctgaaaaagcgggtggcagaagccatcgaccccaaccgtccggcctttgatgtgctgtgcggcaccgtggatgagggcatcgacacccagcgggtgcagcagctgtttgccgggctgaaaaagggcattgtggagatcatggaacagatcgcgccccagcatgagaagatcgacaccagcgtgctggagaccccctacacccatcagcagcgccgggatgcggcctttgagatcaatctgctcaccggctttgatcccgactgtgcccatgacagccaggtgctccacggcatgtgcaccggcgtcggcccccgggatagccgtattgccatcagctataaaggggtatggggcggtatctttaccatgctccacgaaggcggccatgcccgctatggttacagctccaatgaccgggcggtggaatgcggcctgtggggcggtctgagtggcgccatgcacgagggccaggcccgcttctatgagaatatcatcggcaaatctcccgaattctggcgtctggcctatccggtggcggtgaagcacttcccctatctgaaggatgtgcccatggagaaattctacatggcccagatgaaggtgcagccttccctccaccggattaccgccgacgagctgacatacagcctccatcccatcatccgttttgagatggagaaggattactttgacggcaagaccagcaccgatgattttgaggagatctggcgggagaagtacaaggagaccttcggccttgtgcccaaggacgcccgggaaggtgtcttgcaggatatccactgggcatctggccacatcggctatttccagagctataccttgggcaacctgtatgggggacagatgctccatgccatgaagaaggtgctgcccaactttgatgagctggtggagaagggcgactttgcacccatcaaccagtggctctatgacaatgtgcaccagttcggccgggccatgacacccaccgaggtgctgctccacgccaccggcgaagagctgaccgagacctatttcctggattatctccgggataaatacctgaacaagctccgcaacatctagcggcggtccggtgtccggacggtcatatctttggcttgggaaggaaaacgacagaaacaggcccccggcgcagtctgcgccgggggcctgttctttttatcaatcgctggaagaggcgaaggacgctgccacggcctgggcgatggcctgggccgtctggtcgatgttttgggggtcggtgatggtgccgaactcctgggggttggtcaggcatccattttccaataaaatggcggggcaatgggtctggcggcacacatagagcaaactgccgctttgggccgggttggccgcccgtccggtgctttccacgctttggcagatgctctgggccagggactgggaaagctccccttggcagtaggccgaaaaacctcctgtggccgacagatcctcatccggcccgccgctgccatagtggaaggacaaaaacaggtcgggcatctcctggaaagactgctcaaaccgctgccgggggctgagggtttcgtctttttcccgggtgtaggataccgtggcccccatttcctctagcttttcccccaccgcctgacacagggccaggttcagatctttttctgcacagcttgggtcacagccgatggcaccctcctggtttccgccatggccggcatccagcagaatgtgtacccccgaaagcccctcctctggagtgggcttttttcgcacatggagcgtggcaccctggtctgttttttcaaaatagaacccccaggggctgatgtccttcaaggtgaaggaatagaccaggcacccgtcctccacctggcacagggattgggccacctgctccccggaaagggaggccccccggatcacccccggaaagcgcaccttcagcatcccatcctcccatgtgcagcaagccgccaaagggccctcgctttggaaggagaccagggtctcctcctctcccggggatacggaggcagcggtgatctccctgttttcttcttcggtagaaagggagatgtcgttgagcgaaagataccccaggccgggcacctgggcatagccctgggagatggcagacgccggccctgtcattccttcccgcagggtgctggtggagccttgggaggaatcgggggattggtagatatcgcacaggtcggtctgtacctggaaggacagagacagttgctttcccgtctggtaaaagccccctggggccagtgtggcggtgacgaaattgccccggcggatcacatagaggggggagccgtaccgggtcacctgatcctcctttccctggggcagagaaatgctggcctggtaatcctccccttgccaggaaaggggatggctttttcccagaaacaacgcggtaacggcggcgcctggtcgggccgtcagacgcaggagggcttgctgtcccggtgagatataggtatctcctaggggagccgcttcctcccagcaggaagcggccaggccacgcagtagacggcaggtgaggatatgggggccattttccagggtgaaggtgttgaaccccggctccagggacagcagcaccccaaagctgccgtcctttccgcgggaaagcaccggctggccgttgatggtcaggggctggctgggatcggagatgccgcagaaataataagaagaacagtccgtgcgggtcagatccctgggttgggacagtttcagcgggctttctcctcccggcgcttcctcggatggttcctcatcgctcaccggggcaggttccgtcagcacttctcccaaagcggcggtcatgggggaaagggagcccatgcggaacagaatcagcccctggcttttgccgttttgcagcaggtcgatctggcccaggatctcctcatagccctgccagggggcggcggagtccccgcccatggccttgtaggccgccagggcgggcaccaactggcactgggtgcccgacaccgtgttttcccaccattttagcagagtggtgaaatccgagccctcctggccccggtaccaatagagctggggggagatatagtccagcagcccttcctgcacccaaaggcgggtgtcggcatagtgggcaaaatagctttgggtgccggcggtgtcgctgcccccttccagctgggaggcgttggcccagatgccaaagggggaaacgccaaactgagcctgggggtttgtttcctcaatggtatcgtggagcagggagatcagctctgtcacattgctgcggcggaagtcatccagggaggtcccttgtccatattgagcgtaggaggcgctgtctccaaaatccgtgccggggtaaaaataatcgtccaggtggatgccgtccaccgggtagttttccaaaatctcccgcaccccgtcggccaccagctggcgcacctggggcagggccgggtcaaaatacagttctccgttatggaaaatcaccagagagggatctttccgggccggatggttttctgccagggtgtcgagacaggcttccttggtggccccctgcacgccctgggtcacccggtaagggttgatccaggcgtggacctccatgccatattcatgggcctgctctgtgagataggccaggggatcgaagccatctgccggggcctggccctgttttcctgtgagatagcggctgtaagggaagatggaggacggatacagggcatcggcacagggccgcacctgaaagaagatgctgttcagtccggccttttgggcgttttgcagaatgggatccagctctcccttcatttcctccggagacagaccgggggaggaagggaagtccaggttggaaacggtggagacgaacaccccacgcagcgaaagctctgagccatggcagggcaaaccgcaaaaaagcagcaggcaaagagcgcaaaagcaaaaacggcgcagaagcatcaaacattcctcctttttgttcttccggtggcaccaaaaaaattttccggtgtgctcctatccatcctatgggcctttgtgctaaaatagtacaagccgaaagagatatatgggaggtttttgcatgggagaacatttacgcctggcggcgcttcacgatatttccggttttggacgggggtccatgaccacggccattgccgtttcttcggcagcgggggtgcagtgctgtccggtggtggggtcggtgctttcggcccacaccgcctatccccaggtgacggtgcgggatcttacagaggatctgccggggtacattgacagctggcagcgcctgggctgtgattttgacgcattgtacagcggctatatgagccatgtgagccagggggagcagatgctgcggctgctggaaacaaacgcccgtcccggctgtttgtttttggtggacccggtgatgggggacaacggcaaagcctattccggcgccttcggggcggagtttgcccggcagatgcgggactattgcgcccatgcccacatcgtcacccccaacctgaccgaggccgccatgctgctgggcaaggaaccggatgcctggaagcgggaagagcatccggtggaacggtatctggaagggcttttggaaatgggctgtcaggcggcggtgatcaccggggtggaaaccggagaaggccgcatcggcgcccggtacctcacccgggatggccagcaggggttggctgattgtccccgggtggacgcctatttcccgggcacgggggatctgtttgcttcggtgctgctggtgacattgctgcgccggggaaaaagccggctggatgagggcgtgcagatggcggtggactttgtctaccagtgtgtggagcacacccacaaggcgggcacgccccctctcaacggtgtgctgctggaggagatgctccctattttatgggagaaactccggtagagaaaaggcatcccggcggaggggatttctccgccgggaaaagttttttcaaaaaaaataaaaaaatttcaaaaaacccctttacaaacagggcaaagggcgttatactatgggagcgtcgtaacggtgaaggaaaccacggtgaaggcgctgagtgataaaggggtatagctcagctggtagagcagtggtctccaaaaccacgtgccgagggttcaagtccttctgcccctgccatacggccgtgtagttcagttggttagaacgctagcctgtcacgctagaggtcgacggttcgagc

SEQ ID NO: 4543 - DNA, 22093 bp, Unknown
  16S sequences of unknown bacteria
cgctgaagatacttggcgggaagctgcctgggaaattaggaagtcgccggttttttctttttttggaaaatatgtgaatgatgaaggaacagcaccgagccttgcggccggcgctgttcctttccttatagagccgctatttttcccgttattagacatatctaccttgaaaaaaattgcaattggtgtacaattatacgtgtaaaaaactgagaggagacgacaagatgacggattggggaagaaatgatccgtgctggtgcggcagcggaaagaaatacaagaaatgccattacgagttcgaccgtaaattggaagaattatacgatatgggagcagtggttcccagtcgggacattatcaagacaccggaagaaattgagggaattcgcaagagcgcgcaggtgaacattgcggtgctggattatgtggcagaacatattcgggaaggcatcagcactgcggaaattgataaatgggtgtacgacgagaccaccaagcggggcggaattccggcaccgctggactacgaaggttttccgaagagcgtgtgcacttccatcaatgaggaggtatgccacggcatcccttccgaggatgtaatattgaaggacggagatatcatcaacgtggacgtatccacgattttggatggatattattccgattcctcccggatgttctgcatcggaaacgtcgctccggagaaccgcaagttggtggaagatgtccacaaagccattgaaatcggcctggaacaggtgaagccgtggggctacctgggcgacatgggacaggctatcaatgattttgccaaatcccagggctacagcgtggttcgggaaatcggcggtcacggctgcggcctcgagttccacgaagatccgtgggttggttttaccacaaaaaaaggcacggagatggttatggcaccgggcatgattttcaccatcgagccgatgatcaacctgggaaaaccgcaggtttacacggataaagataacggctggaccgtgtacaccagagacggaaagccgtcggcacagtgggagattcaggtactcatcaccgaagacgggtacgagattttagcgtactagcgcaaggcgggcggagccccaaccgacacggcgaagtcctcacatgcgggcggagcccaacagaaatattcaacggaaaaagagggagacagtgtcaaagaaaattcttgacaccgcctccttcttatggtatattaggcaagtatgattgagaatttatccaaagtagaatatgcaagcctgctgtacgacttttacggcgaactgctggacgagaacaagaaagaaatcatgaacctgtatcatgaggataacctttctctggcagagattgcagaggatttgggacagagccgacagggcgtgcactacaccctgaagaaggcggagaagtccctggagaaatatgaagaacgactgggactggttcgaaagtatctggagaacctgcgaaagtaccagcaagtggagcagattgcggagaagtaccggaaggacgattccctggatgaaggggttcggcaggatatccgggtgctcaccgacatgattaaagatttaatggagtagaagatggcatttgaaggattagcggataagttgcaagataccttcagacatctgcgcggcaagggcgttctcacggagaaggacatcgattcggcgatgcgggaagtgaagctggcattgcttgaggcggacgtgaacttcaaagtggtaaagaagttcgttgcggatgtgaaggaaaaggccatgggccaggacgtgatgaagagcctgaccccggcacagcaggttgtcaagatcgtcaaagatgaactggtggacatgatgggcggcgccaacagcaagctcacctattccccgagcggtttcaccgtctacatgatggtgggactccagggtaccggtaaaaccaccacctgcggaaaattagccaattacctgaaacagaacggaaagaaaccgatgctctgtgcctgcgacgtgtaccgtccggcggcgatcgatcagctggaagtggttggaaaagcagtgaataccccggtattcaccatgcgagaatccgacaacccggtggaaattgccaaagccgcggtggaagcggcggagcgcaagggctgcaatgtattgatcgtagatactgccggccggctacagattgatgagaagctgatggatgagctgaaacagctcaagaaaaacatccgccctcacgagattctgctggtcgtagacgctctcaccggtcaggatgcggtgaacatcgcctccggcttcgacgaagccctgggtgtggatggcatcgtgatgaccaagatggacggtgactcccgaggcggtgcggcactttcggccaagagcgtaacgggcaagccaatcaagttcatgggtaccggcgagaagtacgacgctttggagccgttccatccggatcgaatcgcttcccgaatcctgggaatgggcgatatgatgagcctgatcgagcatgcggagaattcctacaccgaagaagaagccctgaaaatggaagagaagcttcggaagaacaagttcgatctggacgatttcctcgaacagatggagcaaatcaataagatgggcggtctggcaaaaataatcggcatgattccgggcatttccgagagggacaagcagcagctggacttcgaacgaggtgcggagcagctgaaccagatgaaggcgattatccagtccatgaccaaagcggaacgaagagacccttccattctcaacgccagccggcggaagagaattgctgcgggaagcggaagaacggtcaccgaagtgaacgcgctgattaagcagttcacggagatgaagaagcagctgaaaatgttcaacaacccgaaggctatgaagagaaacaagctatttcgcggtttgatgtaatatgccgtatcggcagcttacgacgtaactaatttatttttttattaaacaggaggacaaaatggtaaagattagactgaagagaatgggcgcacacaagagacctttctacagagtagtagtagcggattcccgtaccccaagagatggcagattcatcgaggaaatcggaacttacaacccgctgaaggaccctgcagagatcaagatcgatgtagaagcagctcagaagtggatttccaacggtgcacagccgactgatacagtaagagctcttctgaaaaaatccggcgtagaactctaagagaagggaatttcaaatcatggctagtctagttgaagcaattgccaaagcactggtatctaagcctgacgaagtcgttgtaaccacagaaggaacggaagataacattaccgtattcctcaaagttgcgaaagatgatatgggtaagatcattggcaaacagggacggattgcgaaagccattcgaacagtggtcaaagcggcagccatcaagcagaacaaaagagtctcggtggagatcgtagaagactaatatcagagtctggcgaactgaaagatacaagcatgcaggagagatttctgcatgcttgtttgctaataggagaaaaaaatggctttaaaagatgacaatacgatggtgaatatcggccgcctcacctcggcggtgggactgaaaggcgagattaaggtgctgacctatgcggaagattcagagaatcttcacgaaggcacggtgctttacatggaaaaagggggtacaataaccacggcggaagttaccggaatccggtttcaaaagaaccgtccggtgattcgcttggagaacgtgacggatcgaaacggcgcagaagcgttgcggaatatggagatttacatctccgaagaggacctggaggagctcccggagggggaatactacatccgggatctgattggatgtgaggtgtacgatcgcgccagcggacggaccctgggtaaagtggacgatgtgcttcagaacacggcccagagcgtctatcgggtgctggatgagaatggaaaggaaattctgattccggcggtagaagccttcgaacgggacatcgatccggagcgaggcatgattgaagtggaattgattccgggatttctggaggactagaatgaaaatcaatattttgaccctgttcccggagatgttcaccccgctgcaggagagcatgctgggaagagcccgggagaagggcatcctggatatcaacttgatcaatattcgggattacacggaagataagcacaaccgagtggacgataccccattcggcggcggcgcgggaatggtgatgcaggtgcagcccatcctgtcggcctaccgagaaaatcatctgcagggaccgtgtctgtacatgtcccctcgcggcaaaatgctgaacggagagatggcagaatccctgtctcggcaggaggagattactattctgtgcggtcactacgaaggggtggatcagcgcgccctggacctgctgcaggcagaggaagtcaccatcggcgactatattctaaccggcggagaacttcccgccatggttctggtggatacggtcgctcgttttttggacggggtgctggccggagaggaatcggtaaaagaagaatccgtctattccggacttctggaatatcctcactacaccaaaccccgggaggtggaaggtctcgctgtaccggaggttctggtcagcggaaaccatgaaaaaatcgatctctggcgatacgagaaatccttggaaatcaccaaggaacggcggccggatcttttccgagaatacttggaatccgagccttccctctccaagaaggagaagaaaatcttagaaggaatgaagtagaatggggacggttttcgccgccgtttccgaataaaaatttattgtatttggggaataattcgtgtagaattaatcagtaggagtgcgtatgaaaaagaagtggatttggtggggaatatacataatcgccgtaattttattagcggtgattatatacgtggttccgtcgctgatgggacttctggataccacatatacgattgaaagcggaacggtacaggtgaaagattccgtagacgatgcctggattatccgggacgacacggtatacagcgcaaaggaagatgcatccatggatgcattggtgaaggacggcaccctggtgaagggtaagagccgcgtggcagcgctgaaggccggcggaagccaaaccctgggaccgaagtatatgaagctgagccataagctgggaaagtcgatgaaggccacggatggaaccgttccctccggtgggtacgtgagctattccgcagatggttatgaaggcactctgaactcttccgtgctggataaggtgacggagaaaaccctgaagtctgtgagcaacgacagcctggatctcagcggttcatcctgtgccgccggacagccgattttccgtattacaaagaacggaacctggtggctcgtattttttgcggatgcggatcaggcgaagaagtacacggtgggcggcaaggttcagaccactttggaagacaagaccctggagaccaccgtgcgttctgtgcagaaggacggggatcgtcggcgcatcgttctctcctgcaaggaataccatccgtcttatcggacggagcgaaaggtttccctggagaacgtgacggaaagcgacaccggattgctggtggaaacccggagcattgtaaaaatcaaggatcgggagggtgttctggttctggacaaggtgaggcggaagcacttcaccccgattcagattaaagcctccaacggcgagaccgccgcggtctacgaagatctatacatgaacagcaatggcgaattcgtggagaccgtcaacaattacgacgaagtcgtcaagtcgccgagcacgaaggatattaaagaagcaaaaaagaatctcaattaagaggagcggatggaaatgagcatcggagagaattatctggaaattgtagaacgcaagaacagagcagctgtccggagtggaagaaatccggaggatgtcctgctcctggcagtgaccaaactgcacaccgtagaagagatcaatcaggctatttccgcaggggcaacggatgccggcgagaaccgggttcaggagctcttggagaagtatgaccgcacggcagagccggtgcgctggcacctgatcggtcatctgcaaaccaacaaagtgaagaatattatcgataaggttgtcctgattcactctgtggattcgctaaagctggcgaaagaaatcagcaaacgggcgattgccgcggacaaagtgatggacatcctcattgaaatcaatattggaatggaagaatccaagtccggagtaccggcggaggatgtggaatctctggtaaaagaaatcgccgcggaatgcgaaggcgtccgaattcgaggcgtgatgtgcgtgccgcccatcggagagaccccggaagattccagaccttattttaaaaagacgaaggcaatctttgataacctgaagaccctggacctcccgcaggagcgattcttgccggatactctgtccatgggcatgtccggagatttcgaagtggcggtggaagaaggcgccacaatcgtacgggtgggaagctccatcttcggaaagagaaattatcgctgattttaaatggtatcgactgcatgaacgtgcggaaatggaggaagtgtaatgggcattaaggactttgtgaatggcgtcctgggcattgacgatgaatatgaagatgaagtaatcacggaaaaggaaatcgaggaagagaagaagaaaatctccgcctcttcccggtccggcgaaggaattaaggtggacaaagtggaaccgactcctgccggaaacagctataagatggataattcctacgagagcatcgcaccgaagctttccagaggacaggtgaataagaactattccatgaacggttccgcaccgttcaagatgttggttgttgagccgaagtcctttgatgaatgcaccaagctggtggacaatctgaaatccagaaagccggtcatcatcaacctggagcgggtggaaacggatctggcaaagaagatgttcgactttatgagcggcgcaacctatgccctgagcggaaacgttcagcgcgtaaccgcaaatatttttatcttcgcaccggccaatgtggatatcgccgcgaagatgaacaatcgggaaaccgcggcacagccggcttccggaaactatccgtcccaagagaccaagagtccgtggaggtagtgcatgggtttggtgttgattcgagcaatccattggtttgccgaaatattgattatgatgctgttcatacagtgcatcctcagctggtttgtgcaatcgccggcatccccgctgttcaatgcgtatcggatactgacgcagctgacggatccttttgtggcaccgtttcgaaagcttctgtccaacttcaacacgggaatgttcgacttttccgtgttgctggcattctttgccattgagttcgcggaacagattttgacgctgctgatcagtaacttattgctgtagctatatagaaagggaaggtactatcactatgattatgccaattgatatcgataagaaagagtttaccagagataagaagggatacaattccagagaggtggatgaatttctggacctgattatcgtcgattatgagaaatgcctcaatgacaacagaagcatggcgcacaagattaagttcttggaaaagcagctggaagaggctcagaagtccgacaatgcgatgctggacacactggaaaccgcaaagcgcctgatggcagatatttctgccagtgcagagcggagagcggagctgatgattcgcgacgcagagctggaagcggagaccatggttctggatgccaaggcaaccgttcgcaagctgaacgatgagcacgttttgctgaagaacaaggtggagagactgagaaccaattacagaagaatgctggaaaacgagctgaacgacttggatgcggacgagtacggcctggatccggatatggaccgcagcgatatcgcggatattgataaggcattctccaatgcaccggatccggaagcaactcaggagacgctggtggtttctcagaagcagaagaaggaaaaggaagttccggaagtaaagtccgctccggtgaccgatccggctcacgcaacggtggcagatctttccgacagcctgaagaaaattgcagaagataagactcagcaggaaggaaccattattctgaaataatgatgattggaacgattattattctggttctggcactggatcagatgacgaaattcctgatacgggcgaattttattgtaggtgagacgctcccgatgattccggacatacttcatttgacgtatgtccggaatacgggggcggcttttagtatgtttcggaatatgccggtggtgaccgtcggctttccgatcctgatggtcatcctgtgtctggcggcgtccgtttatttttatcgccggaaggaacgaattccggccgctctgtgcgccctgatttccgccggaggcatgggaaacctgatcgaccggctgatgctgggatacgtaacggacatgattgattttagggtatttccggttttcaacgtggcggacattgccgtgacggtgggctgcgtgctgctggcactgtggattctcaagacggaggaccggggaaagggggagcagtaatggaccgagaaattctttgtgtggtgacaccggacaaagcgggaaagcgactggatgcctacctggcttcggaggtggaagatctttccagaaactatgcggaaaacctgatcggcgaggaacgggttcacgtgaacgatggcattgaggcgaagaagtacaaagtccgagaaggcgatcgaatccggatccacatgccgacccctcgtcccatcgatgtggaacctcagaacattcccctggaaattctgtacgaagatgaagatgtcatcgtggtgaacaaaccccgtggcatggtggtgcatcccagcgccggcaattgggacggcaccctggtaaatgccatcatgtaccactgtggcgattccttgtcctctatcaacggggccatccgtcccggcatcgtacaccgaatcgataaggacaccagcggccttctcatgattgcgaagaataacaaggcacatgagtctttggcggagcagcttcgggtgcacagcgtgacccgggaataccgggcgctggtctacgacaacattcgggaagacgagctgaccatcgacattcccatcggccgcgatgagcggaaccgcctccggcgcgctgtgaacggcagcaacccaaaggaggccgtaacccatgtaaaggtactggagcgttacggaaaatacaccctgatcgctgcccggctggaaacgggtcggacccatcagattcgcgtgcacctctcccacatcaagcatccgctggtgggggataccacctacggaccgaagaagcagatctacgggctggaaggccagctgcttcacgccaaaaccctgggctttatccatccgtccaccggagaatacatggaattcgacagccccctgccggattatttcaaagacatattggaacgaattgaaaggagcagatcatgagcaaagtcacatccaaacccggaaccatgctctatccggtccctaccgtgatggtgagctgcagcgacggggaaaaagacaatatcatcaccatcggctggtccggcatcgtgaacagcgagccgccgatgacctatgtgtccgtgcgaaaatcccgtttttcccatcatctgatacaggcaaaaaaagaattcgtcatcaacctggtgaacgaggatctggtgaaggcggcggatttctgcggcgtccgttccggcgaaaacctggataagtggaaagaaatgaatctgcaccgggaaaaagcttctatcgtggacgttccgatgatagcagaatccccggtgagcctggaatgcgtggtgaaagaagtctcggagctgggatcccacgatatgttcctggcggaaatcgtggccgttcatgtggatgagaaatacgtgggcgagaacggcgccttcgagttcgagcgcatgaaactcaccgcctacaaccatgggaagtattacgccctcaagaaagagcccctgggcttcttcggtttctcggtgatgaagcccaaaaccgcaaaacggaagcgcagggaagaagccggaaagcggagacaggaattccggaagcgcaccaaggcgaagggaaagccgcggaagaagtagctcgcgtcccggccggtgcccaccggccgaaaccggcggcggactgaaaccggcgggggctttggtgcaagcaaaccgggaaagccattgattacgtaggctttgcaccaagaaaatgcaccgcgcggactgaaaccggcgggggctttggtgcaagcaaaccgggaaagccattgattacgtaggctttgcaccaagaaaatgcaccgcgcggctcgaaaccggcggcggctttggtgcaagcaaaccgggaaagccattgattacgtcggctttgcaccaagaaaatgcgccgccccgcccgaaaccggcggcggccttggtgcaagcaaaccgggaaagccattgattgcgttggctttgcaccaagaaaatgcgccgcgccgcccgaaaccggcgggggacttggtgcaagcaaactgggaaagccattgattgcgtaggctttgcaccaagaaaatgctccgcgccgctttcggaaaagcagaagaaattgacgacgaaacgctctgccccgaggtttcgtcgtcaattctttctttctgaaaattgtaatgatgaaaagtgatgcacggaggtcggtgagagatctccgcgcatcacttttcatcatttaccgtataataagagaattgttatgttttaatccgtaaatcgtttccttatctgaaatcatcaagcggaaagccagttcgtccgttagttccaaaggcacggtggagaaaagcactttcgttgcacacggattccgaatgctttccgataagccggtatacaatccggatgttgtacgtgtgttgttaaatggaaccttggcacagatatagtcgaaactgccggggtgaaatgcattctccaatagaaagtaaacaacaaagtcatagtaacggacttttccatgatatacgtataaacaattccgataattcacttcaggagatgtacattcgttataaagagtcacctcatcatctaacccattttcatttcggctaatttcgataacattaacagaaatacctttcgcatgacttttgttgttcggctccaggtaatagtacatatagaatacatccgtttgttgaaagaagtttttcttattgtcaagaggaagcgcttcccttgtgatagttggagtagcaaatggcagaagctgctccaacgttactccaagaatatgtgcaattttctccaacgtttgaatatctatagaaatagatccattttcgtatttggaaatggtagaaatgctcttattcaaaagaagggagaattctttcagcgaaatacctcgcagctttcgaaaataccggatttgattgccaacatgaatacagatattactcattttctctttccttaaaattgctttttttaataccactatataaatgataagctaatatgcctttaaagtaaaccaaacaaagcatttttccagaatattttcgttaaattacgaatatttgttgaacggactggaaataagacaaaaaggatgtaaatgcattcataacgttgtagccagatgaaaataatgtgaagaacgtgtgaattaatttcttttgagtacaaagtggaagatttgaaattctgagagagtagcgatatagtaacatcaacgaaattgttaaaactttggtttaatcagtaagagattgaagtaaggaggaacaaaatgcagaatccaattgcaacaatcactttgaacaatggaagcaagattgttctggagttgagaccggactatgcgtacaacgaagtttgcagctttatcagtgtcgcacagaaagggtattacaacaactttgccattcagagaattgttcccggatcctggattgatgcaagttataacgcatttttccgaaaggaatgtcagtactttcttccgaatcgaattgaagaagaaagtaaaggggaaatcaaaattccggaatttggtgatgtatgtctcggatatttttcggacacggaaatcgccggggcggaattctttttcccgctccaacgggtggaggcattaaagggaaagtgtccggtttttgcgcaggtaattcagggtgcggaagaactgcatcgaattgaaaaagtggaaacgtatccgaacccgtatgagccggtggaaatcaatgttccgagaaacccggagattatggttacggtggaagtggaaacattcggcgtggattatccggaaccggaaaagattattccggagaaaatgccggagaactggccgacgttcgcgtagaaaaaatctgttttgacattaatggaggtatgttatgtctgatattttggcttttacaatatttgtacttatttttacaataggtgaatatgttgcggttaaaacaaaagcaaatgttgatgtggtgctgttcgttgcagtcgttcttcttgttggtttctgggtgggacttccgaaaagcatctatgaagtatccggaattttgccaatggccggaatcatcattactctgctaatcgttggaatgggtaatatgattgacttcgcagagctgaaaagacagtggaagaccgtatgcatttcgattatcgcgcttacagcagcatgctttgcattggtatttgtaggacagtttgtaatcggaagagactatgctcttgccggaacaccggtattcagcggtggtacagcggcaacggttgcgatgaaggccatccttggtgaaaaaggaaaagaatatctttccgtatatatcacattgcttttgggattgcagagtttggtaggaattccggtttcgtcccagttcttgaagagagcaggaaaggctttcaaaaataacaaagcggagtttgaattatacagacatgcggtaacgggagaattgacctctgagaaaaagaaattgatccattttccggaatctttaaacagaccgtcgttccacctgatgaagctgggtgctgtcggagtcgtaagttattatttctctgccattcttctgaaacttacgggaataaatattagctacattatcgttgcgttgattatgggtacgatttttacggaaatcgggttcctcgataaagacactttggacaaaacagaagcaagcggatttatcctgttcggctgcgtaatcattctcttctctgattttgcaacctgctctccatccgatgtaatcgcattgctcaagccgatggcgtttattctgttggtgggcaccttcttcggatgcattaccggtgcaatttgcggaaaaatctttaaagttgagaagaatttggccattgtaatgtgcctgacctgtatgtatggattccctgcaacaatgtacctttcaaaggaggttgcagaggtaaccgcagaaaacgaggaagagcgtcagactattgagaactacctgctgcctaagatgaacatcgccggctttgtaaccggaagctttgcaacagttcttgccggaatcttcggaggaatgctctagaaagatcctcgtgctcagtgagaataacggaaaacaaaaacattcggaagtgctgatgcttccgaatgtttttatttgcttttctatttcccgtctgctccttccggcagcttcgggtccacgtacacggtggtgttgtgggtgaagatgaccatgcccggtttggcaccgcttggttttttcacgtatcggatgggtacgaagtccaccggcacgttctgggattccttgcccttgctgtggtatgcagcgatggaggctacctgatagataatttcctccgggatgtcctccggggattgattcggctccaggggcaggatgacgtgagatcccgggatatccttggtgtggaaccacaggtcccgctttccggccatctttgtggtgaggtaatcgttttccttgttgtttctgcccacgaagaccttccggcccgtcggcagagtgtattcgattgggtgaggcttggatttttttcggcggaaacccttctgggctctcttgcgaacgtatcccgtatcctccagctcctctcgaatctggttcagttcttccaaagtgtgagcgctttcaatgctctggagaacggattccagatagagaatatccttcgaggtttcttccaactggtgggttttctcgtgaaccgccgtcttcgccttggaatactttttgaaataattctgagcattcttggaagcggcatatttctcgtctaaaggaatggtcaccggttgattgtcgtagtagctgatgacggtcacctcatgagcacccggttccacccggtgcaggttcgcggtgagcagttccccgtaaaggcggtatttctcggaattctcggcctgaagcaaatcctcccccaggcgctgcttcttcagccgagccttgtccagggaagcctgaaccgaccggtgcagcgggttggaccgctgacggatggcattggactcctcccgatgggtgtagaagtactccgtcgcttcgctgatagagtcgaaggttttttcctgtgcccccacgtattccccaagctccgtcaaatgaaattccaggggcttgcccgtttcatccagatacacgcggggatcggcggtgccgttctcaatgctatccagaattttctccaaccgttccaccggatttccggaacgagccagctctcgggaaatccccggagagattccctgaatgtgggatagcaaatacttcgggtcagcagcggcttccggatccgaatccagtttctccgacagctccgccgagatttccttgaaaggaaccttgtcctgtttcggcggataccggtattccagccccggcagcagctgccggtatcggttcacatcgatagaaatccgcttgatgctgtcgatgatttttcccgtatccaaagccaccagcacaatgttgctgtgctttcccatgatttcaaaaatcagccgtttcgacaccgtgaatcccagttccgtctgtgcctcgatatccatttcgatgatccgctccgaacctctctgatgaatgtctgtaatgcgtccggtctgaatgtgcttccgcagcagcatgcagaaattcggcggagcggccgggttcacaaatttcccgtcggtgaggcagaccctggcggcctgactggcagcagaggcgtacagcttcacgttccccttgcgagtgtgaatctgcagcaccagttcttcgctacccggctggtagaccttctcaatctttccgaaggtcagtcgttcttttaattcttctgttattccatatgttataattccatcgtaagccatgtgactaatatagcacgagaaccaccggaatatcaagtgaaatcgccgtttctaagccacagaatcctttacagaatcgatagaaggtgataaaataatgagtaatttgatttcacaatggaggaaattatggttaaaagcatgaccggttatggccggggggaatacatcgacgaaaagaaaagcatcaccgtagaaatcaaggcggtaaatcaccgttattgcgacgtatacgtaaagatgccgagaagatattcttttgcggaggagcgaatcaagagcgacgtgcgggatgcactgaagcgcggaaagattgaggtactggttaccgtagattccttcggcgagagtgagaacgacatccgtctgaatgaggacgttgcccggaaatactacagagcgctgaaagctttggaggagacgttcgaactggatcagaagggcggcgtaacactgagcatgctggcgggcatgccggatgtgattaaagccgtgccggcggaggaagatgaggaagcgctgctgcactccctgggcgtggcaacggaaatcgccctgcagaacatcatcaacatgagagccgcagagggcgagcgcttggcaaaggacattctgatgcgggcggatatcattgaggaaatcaaggataagattaaggaacgggcaccggaaatcggcaaggagtacgccgacaagttccgggaacgggtcaacgagcttctggaaggaaagctggaggttccggaagagcgcgtgctggtggaagcggcggtatttgcggacaaagccaacatcaccgaggagctggttcgcctggagagccacattcagcagctgcggaatttcttcgataccgaggaagagaccgtgggcaaaaaaatagatttcttgattcaggagatgaaccgggaagccaacaccatcggctccaaatccaacgatacggagattacctcctggatgctggatttaaaggcggaaattgaaaaaatccgggaacaggtacagaatatagagtagcaaagaacggctgaaatatgctataatatttagccgatatgaaacatatcttttgaaagggagaattccatggcaaaacatcgttcgcagaaaggaacactattcgtcatttccggaccttccggaacgggaaaaggcacgctctgtaaagaactcctcaaggaaaacgacctgaagctgtccatttccatgaccacgagacagccgagagagggagagcagaacggccgggactacttcttcgttacgagagaagaatttgagaagaacatcgcggaaggaaacctgctggaatatgcggatgtgttcggaaacctgtacggaaccccgaaggatgcggtggtccggcagctggagcggggaagaaacgtgcttttggaaatcgatgtccagggggcgctgaaggtgaaggaagcgatgaacgaagcggttcttgtttttcttttgccgccgagcatgaaggttttgcaggaacgtctgtccggaagaggcaccgattcggaagaggtgattcagcggagattccgagaggcgctgaacgagattcgcctgctgggagaatacgattattacgtggtgaacgatgacctggaagaagcggttgccgatgtggcggccgtggtacgtgcggagagccgccgggttccgggcaaggtgaaaccgattattcgggattatgaagaggaagataactagagatacgctgttgaaacggtacgaaatgggaggaatgatattatgatgctttatccatcggtaaacaagttaagagaaaaagtggacagccgctacaccctgtgcatgctggcggccaagagagccagagatctgattgccaagaagccggcgctgacggaagttcagtcggaaagaccggtcagccaggcggcgaacgaaatcgcagaggatttgattacgtatcgtcgggtagaggaaccggaagaggcagtggaagcagagaccgaagcggaagagactgcttgcgaggagtgcaccgcagaaggcgaagagacggaagtaacggagccggaagcataagggattttgacagaattaataagaaatgagaatgggttctttaatgagggaatccatttttcatatataattattttatgatgctgcaaaggggatgcggtatcgtttgattggacaaaaggggacggagagtgtattatgaaaaaagaatttggagaaaacctgcgggttgaaatctacggggaatcccacagcgaccgaatcggcgtgattgtaaaaggcttgccgaggggtgcggaattccaccgggagaagctggcggatttcatggcgcgacgagcacccgggaaaaaaggcggcaatcgaatcgacgattcggcggcgacggctcggaaggaaccggatcgggtggtttttctgcgaggcattcaggaggcggaagccggtaaggcaatcctcacgggagaagagctggaggcgtgcatttacaataccaaccgtcgctccggggattacgatgaacttcggaaggtgctgcggccggggcatgcggatctgggcgcgtacctgaaggagggaccggaagggcttcgccccggcggaggtcgtttttccggcagaatgacggcaccgatgtgcattgccggcggaattgcccttcagcttctggcaaaaaaaggaatttccgtgcatgcagagtataccgaaatcggcgggaaatcggatccggaagaaatcgaacaggcgctgagccgtgcggcggaagagaaggattccctggggggcattgtttcgtgtcgggtatccggattcccggccggagtgggcggtgccctgtacgaaggattagaaggtgccatcgcctcctcgatatttgccatcccggcggtcaaaggcattgagttcggcagcggttttgaaggaagccggatgcgggggtcggagaacaacgatcccattcttttgcgggacggacatctaatcaccgagacaaataatgccggcggcattaacggcggtatcagcaacggcatggatatcgaatttcgggtggcgtttaaaccgacgcccaccatcggctgcgaacagcggacggtgaatatccaagaaatgaaagaaacggtattgtgcgccggcggacgccatgatgtatgcgtggtccctcgggcggttccggtggtggaagcggctgcggcactggttttattggatgcttggatgggggaaggcgatgaaagatagaagaaaatacggcgtaatcgggaggcatatctcccacagtctctccccggagctccacgggattttcgcccgatatacccggccctatgactacgagcggctggatctggaggagcacgaactggagggcgtgattcggaatacggaatacagcggttttaacgtgaccagcccctacaagcgagcggtgattccgtttctggatgagctgacaccggaggcggaggctcttcaagcggtaaacaccattcgacgcctgagcaacgggcgcctggtggggcacaatacggatgtgtacggtttcgagaagctggcgaaggagaaacggattcgaggccggaaggttctggtgttgggaaccggaggggcatcctccgccatctgtcaggccctccggaatctggcggcgaaagaaattattcgggtgtcccggaaccggcggccggaaccggactgctgcacctacgacgagctgaaccgccatccggatgcgcaggtaatcgtgaattcgacgcccatcggaatgtatcccaacaacggacattcacctttggacgggtgttccgtgaagtggacggatttccagcagctggagacggcgctggatgccatctacaacccgtaccgaacgaagtttctgatggatgcggaagaagcgggagccgaagtggaatccgggctggccatgctggtataccaaggactgcggtccgcacagatctggggagaggtgccccgcagcggaaaaggccggcgtatcgtggcggagcagacccgtggagagaatggacgaaagaaagaaaaaaagaaaagatccattccggtagatctgggacgggaggcgatgaaaagccttctgcgaaagcaattgaacatcacggtaatcggcatgccgggaagcgggaaatcctccatcagccggcaagtggcgattcgcaccgggagaaccttcgtggatctggatcgagagattaacaaaatctacgggatgacttccggagaaatgattcgccaatatggagaagactatttccgggaacgggaaagtgccaccctgaagaagtactgccgggggaacggaatggtaatttccaccggaggcggaatcgtggttcgagaggagaactggccggtgctgcgggagaacagcctggtggtgtacttggaacgcccccttcatcaactggcgaaaaaagatcgcccgatgaccgccgcccttggggtggaggaactctaccgccagcgcggctggaaatatgagaaggtggcgaatctggtaatctacaacaaccgggaattcggccttcgggaaaaagaaaagaaaaaagcaaatgcgaagattcggaatcagaattattacatggaagatatccggcgcttcgccgatcaggtgaaacggcgagtggcgaagcatatcaacgaaagtgtcaatcgctgatgtgccggatccgggagaattcaacagagtaaaggatggaagatatgaccaacaagaaagatgtattgtcggaaaccttcatttgggaaggaaaagaagagaatgaagaaccggaaaaccgggaatccatcgaaatcattttggcgcgaggcgtgatgaacacgcgggcaatgatgaaagaaggagatgaggaagtccagattgtgtgcatgtcggaagtcatgggcggttggacggaagccttcgagaccctgttcgagaatcagaaggatgaggcctttgtccgggaaatctgcatggaaatcgaacagaacctgatttccgaagtgaaggacctgggggaggagatgctgacgattttcgagcacatggacatgatggatgcgcttccggaaatctgcccggcggagctggaagtgcggtatcttctcacgtcggataacgacattcgggtggaagtcggcaatgagttcctggaccggatgatggaggtgcagctggaggatccggagattgatgaagatctggcggaggcgctgcatcaagaactggtgagccttctggaagccgcgacaaagctgtatgtaatctatcgcggagagctgtgccgtcgcaaatgggagctggccatcaatattaactttgaagatccggagaaatttcgggaattgaaggaagaacagcaggaagaaaaatgattcgaacaaaggaaattatccgggacgcgttctgggaactcctggaggaaaaaccatacaacaagattacggtgcaggatattgtcaatcgctgtcaggtgaatcgaaacaccttctactaccattttcagaacattccggcgttgatggaggaatccgtcaaagagtggatggaggatgtgattcaccggtacggcaatctggaatccccggcatattgtttgacatatattgccggggagtgcatgaaacggaagaatgcctttctgcatctgtttcgctctgcccaaaaggatgtgttccttttcagcttgaacaagatggcctgcggcgtggtgaaagcgtatgtggatgaagatgaggagtacaaggaaagttcttctgagggaaaggaaagagtcatccgctgctataaatgcttgtttgtggggattatcttggactggctggaggaaaatgcctcctttgatttgccggaattctgcgaggagatctgcaaaactctggcagaatctgctccccatatgatggggagatacccgaacgaatagaaatgtagaaaaggtagatagggggggtgcggacaatctcttggtttattatagactgtccaagaaattgcccgcactcccatctctcactctatacttctttgttattgtcagatgatgtcccatctttcctattttttactaaagacactgcatggcacgaaaacaatccggatagaagtgccagcacagtattaagagccggaaacgagcatgagcttttgttttcagtaaacatcatcaaagcaagtacaacaagcagtatggcaattgtgtacaaacgtccatcgtcattcttgccccgatgctcttcttcattactgttagaagagaatcgggatttccttctttttcttaaaaagtttgcatgataaacagtaagcccggatagaagtcccagcatagtctgaacagccggaaacgaacaagagcttttattttcaataaacatcatcaaagcaattgcaatgatcaatatgccgactgtatataaatgatcgtcgcgatcttcactcatatttctgctcctttttttagggtcttcactttttcctcggggatggattttttgcacggggaatagacaggaat

SEQ ID NO: 4544 - DNA, 22365 bp, Unknown
  16S sequences of unknown bacteria
ctactcgtccgctcatcaccttgcctacgcccaattccacaaacagctgagcagccctgtcgctggcaaggccgacgctttgctcacttacgcccttgatatagcgggcgctggcctcgctcatcatgccaagtgcgcgggaggtgtggcggttattggggccgtcaaacttggcgctttccaacagcaccatctcggttttttccgtaatctcactttccaggccgcccattacccccgccaaagccagcgggccgtttttatccgcaatgatgagcatgctgtcatccagtacatggtgcttgccgtccaatgtggtcatttcttcaccgtctccggcctttcgcacaatgatatgcccatccgccacggcatggtaatcaaacgcatgcagcggctgccccatttccagcattacatagttggtaatatccacaatattggaaaccggccgcatgcctgccgccaacaaacggcgctgcatccagcgcggagaatcgccccttacaatgtccgtcataacgcgtgcggaataccgtggacaaagctgctgttcctgcacctcgatgctcacatggcgacctgccaggtcctctgtttcctgcgttttgatctccggtaggcgtaccggcacattcagcgcagcgccgatttccctagcaatgcccaaaacgctcatacagtcaccccgattggccgaaatctcaaaatcgataacggtatcgtccaagccaagcgccacatataccggcttgcccaaatgcgcctcaaacgcagcgcccagatccataatgccgtctacgctcgccgttttccaatcttcatccgtcaactccaattcgctgccgctgcaaagcattccggcagacggcacgccacgcagcacagctggcttgatctcattgccgctcggcatcactgtaccgaccttggccaccgggcagaccatgccctcatatacattgggtgcgcctgtcacgatctgcagcgtttcttcgcccgttgtcacagtgcaaatctgcaaatggtcgctgttttcatgcggcatgattttaagtagcttacccactacaatgctgtcatacgcgccgtaaacacgttcgatgccttcaatgcccagcccatgcataatcatggtatgggtcagcgtctctatatccacattgatatcaacaaaatcctgtaaccaacttagcggtgctttcatcgcttccccctcctaaaactgcgataggaaccgcacgtcgccctcaaacaacaagcggatatccgtgatgttgtatttgatgtttgccaggcggtcgatgcccatgccaaaggcaaaccctgtgtattcttccgggtctatcccgcagccgcgcaatacgttgggatgcaccatgccacagccgaggatctcgatccacccggttcctttgcacacacggcagcctttgccatggcaggcagagcaggtggcatctacctctgcgcttggctctgtaaagggaaaatagccaggacgaaagcgggtttgtgtatccggcccaaaaaagcgcttggcaaaatcatccagcagccatttcaaatggccaaaatgaatgcccttatccacgaccaacccctctacctggtggaaaactggcgaatgagtggcatcaacgtcgtcgctgcggaatacgcgacccgggcagatcattttgatgggcggcttttggctcagcatcgtacgtgcctgtacagggcttgtatgcgtacgaagaacgatgttgtcgtcgatataaaaagtatcctgttcatcgcgagccggatggtccttagggatattcaacagctcaaaattgtaatgatccagctcgatttccggtccttcgctgatggaaaagcccatttccaagaaggtatcccgtatatcctgtaacaccagcgacagcggatgataggaacccctgggcagctgcgtacccggcgccgttacgtccactgcctctttggcaaagcggatggcgttttccttttcttttaagtccgcctccatcttttccatggccgcagtcaacttctcccttacggcattgaccatctggccaaaggccgggcgctcttccgggctcattttgcccaaaaggcgcatttgctgcgtcaattctcccttacggcccagcactttcaccttcagctgctccagctctgcggaattctgcaccttttgcaaggcttccatcgcagactgcgcaatgtgttccagttgctctttcatgctctgtttcctctccatttcctttatgaagttcaaaataataattgcatataaaaaggcttccccctttgcagggcgaagccatgttcgcggtaccaccagcaattccaaggagcgataagccccttgctcgcactcggctgtatcgggccgacccgttctgcctactgaaccgttcagcagaaagctcaggagtgaacttcccattgtctttggccggaaacgcttacagccggtggcgtttcctctctttggcccagggacaatgctacttttctccctcatcgctgcctctatgattggttggcattatatcataatttgggcagaaacacaaccatattttacagcatcgtgccgccggaacaatccacgatggcgcctacgacctggcaggcagatggcgaacataaaaatgccgccactgtgcccatatcacgcggcgtggcccaccctacgcgcaaaaactgctttttgtattcatacgcttcgctgcccggctggtatacgctcgttgccacataccccggcacaatgccgttgacatagatgccatcgtctatgacctcgttggccaaaccgcgggtcatcgtagtcatcccacccttggcagcgatataggaggtattgttacggctgtttgtcatgatggcggcctttgccagcacattgacaatatgccccccgcgcttgtgcgcacggcattcacggatgaatctccggctcatcataaacgcagagtttaggttgctatccagcgcataggcccattcctcatccgtcaattcatcaaagggcttttgcgccgcgccgccgcccgcattgttgattaggatatccacctggccaaaggctctgatggcacggtcaaacacgccatcaatgtttttggatttactgacatccgccaatacggctagcgttttgaccccatatttttccgccaggccgtccgcaaaagtctgcaccagacgttcatccgaacggctgaccactacgacgttgcatccctcttgggccaatacttcgctgcatccggacccgatgcccttggcgccgcctgttacaatggcggttttaccccgcagacctaaatccatgctgattcctcccatcgcaattcctaagttacatatagtataccttggtttgccatgagcgtaaagcacgcttaggaaaaaagctgaaacataaggatccccgctgctaccgctgcattcaggctttccgccttgcccggcatggggatgcggtagagggccgaacaggccaaagccgtggcctcctccatcccgttggcttccccgccgatgacgcagatacggtttttattgagctccggcatagtgctatggccattcagatgtccgccaatgacagtatatccgcgatttactttataattaaacaacagcgccggcagatcttcggcaaaggcaatatggagcttaaaatgcgcgcccatggcgctgcgcacgcatttgggggcaaagggatcgcagcatccctcgcttaaaactgcgcaggaagcgccaaatgcctgggccgtccttaagatggtacccatattgcccggatccttgacatgatccagcgccaggatataccggccggacacacggcgcagatcctttggcatcagcaccgcagcgcagacgccttgtggcgtcttggtagagcaggcgcgctccaacgcccggtcgtcgcccgcaaaaacctgcccgccggaaagctggacgtactcaatgacgtcccggtatttcccctcgtcgcctgcgcgcaccatcaatagcgcaatgggcgcggcagatagcatcgcatcgcgtacaagacgcgcaccttccaacaaatacagcccagtttggcttcgtgccttatgatcttggagcgctttgaagaatttaacgcgctcatgtgtagccggcagcaaaagcttttccattctacgcttcccctccgcaagaaaaaacgcccttgaacaagcaagggcgctttataacattacgcattcagcgcttttttcgcaacatcacacagggcggtgaacgccgcggcgtcgcgtacagccaaatcagccagcactttgcggttcatttccacgccagcttttttcagcccgttgataaaacgggaatagctgaggtcgttcaaacgtgccgcagcattgatgcgggtgatccacaggcggcggaaatcacgttttttcagcttacggcctttgtagctgtaagccagggatttgatgacagcctgcttggcgatccggtagttgctcttttttgtgccaaaatagcctttggcgagctttaatattttacgacgctttttcacagcgttgacagctcttttcactcttgccatcgcgtatttctcctttcacaaggcttacttataaggaatcagcctcttgattttcttctgttctactgctgcaatcaatgtgcctttgcgcagattgcgtttgcgttttctgctcttagaattgagcaagtggctcttataagccttgtgtctgcgtacctttccgcttcccgtcaaaccgaaccgtttggcagcgccgcggtgtgttttcatcttgggcatagcctaaccctcctctcagttgtttgcgggggccaagatcatgatcatattgcggccctccagcaatggctttcgctccaaagtggaaaaatccttcaccatttcatagaatttgtccatcacatctttgccttggtttgcataggtcatctggcgccccctaaaacggatagacaccttcaccttatccccatcttttaggaactttgtcgcgtttttggccttcacctgcatatcatgcacatcgatggtagcggacaagcgcacctctttgagctgaatggtcttttggtttttgcgctgttccttttcccgtttttgcatttcaaagcgatatttggaataatccatcagcttgcatacgggcggaacggcctgcggcgcgatcttgaccaggtctagctcgcgttcttccgccatacgctgagcgacatcgtttttcacaatgcctaactgttccccgttttcgtctaccaggcgcacctctttatcgcggattgcctcgttgatctgataatcgatgttgctgatcttagccacctccggcaaaaaaataaaatagcgggcagaaacctacccgctatgcaaaagacgattgtgccttaaaacctgacagccaaaccggcaggtgagaagcgggcagctcctacttaccgaatgactataccatatcccggccaagttcgtcaagcgatttttagaaaatctccttgctttccacctgcgcctgcgccatggccaggaaatcctccagcgccatatcgcccatctctccttcgccgcgcttacgcaccgctacttgcccggcctccgcctctctatcaccgatgaccagcatatacggaatacgctcgttgcgggcctggcggatcttatagccgatcttctcgtttctcgcatccagctcaacgcgcagcccggcttggcgcagctgctctgcggccttttgcgcaaaatcgtctacgcgatccgtaatggtcatgacctttacctgtaccggcgccagccaaagcgggaacgcgccgccgaagtgttccgtcaatacgccgataaagcgttcaatgctacccagcaccacgcggtggatcatcaccgggcgatgcttttcgccgtctgccccgtcataggttaagtcaaagcgctccggcatctggaaatctagctgcactgtgccgcattgccaggtgcgcccaatgcagtcctccagatgcacgtcgatctttggcccataaaaagcgccgtcgccctcgttgatggtaaagggccatccctttttcttcaaggcgccgatgagggcgttggtggctgtttcccattgctcgtcggtgcccatgctgtcctcgggcctggtagaaacctctacatggaacttaaagccaaatacattgtagaaatattccgtcagatccagaacaccgatgatctcgtctgtgatctgatccatcgtcataaagatatgcgcatcatcctgtgtaaagcagcgcacgcgcatcaacccatgcagcgcgccggacaattcgtggcggtgtacagtgcccaattccgccattctgaccggtaggtcgcggtagctgtaccgtttgcgcttgaacatcagcatgccgccggggcaattcatcggcttgatggcaaattcctggtcatcaatggcaacggtatacatgttttcgcggtaatgatcccaatgcccgctggttttccagagctggctggaaaggatcatgggcgtgctgatctcctcatatccgcgtttgatatgctctttgcgccaaaaatcgatgagctgatttttcagcaccatgccttttggatggaagaacgggaatcccggcccttcctcctgtacgctgaacagatccagttccttgcccagctttctatggtcgcgttttttcgcctcttccatacggaagatataatcgtccagttcctttttgtcatcaaaagcggtagcatacacgcgctgcagcatctggcgtttctcatcgccgcgccagtaggcgcccgctacgctcatcagcttgaagtggcgcagacggccggtagaggccaagtgcggccccgcgcaaaggtcggtaaaatcgccctgggtatagaaagaaatttccgcatcctccggcagatcgcgaatcaattcttctttgtacggctgtttttgctcctctgcccaagccagcgccttttcgcgcggcatggtactgcgcacgatgggatagtccgcctcgacgatctttttcatttccttttcaatggcaggaaaatcctcggtggtaatgctgccatccaaatcaaaatcatagtaaaacccgtttttaatggccgggccgatggcaaactttacgtttttatcgcgcaacacatgcagtacagcctgcgccatgacgtggctggcggtatggcggacgacctctttgccctcttcgtcgtcaaaggtcaggatgcgtacgcggtccccctcttccagcggctgtgtcagctgtacgatctctccgtttacctcggccgccaccgccgcctttgccagctttttcccgatggactttgccaggtccatagcgttgacgccttcaaatacccgttcactgttgtccggcaaaattaccttcatcgcttttcctcctctgtatcttggccttcccctttttcgctacaaaaaagcccgccccaaaaagggacgagcataatcacccgcggttccacccttgttgcaagctgaatacagcctgccgcttggtttaccggatgacgccggcacgcgtttgtcgcggaatggtatccgtctttgttctttcgcagcaggggtttcagccacgcccccgcctctcttggcgtttttccatagacggcatgtttccggtcagccaaactatttttcttcattatagcatggcggagcggtttgtcaatgctggcaccaccgtatctttacgcgcgggccgaatacctgctctatgatctcatacacccagctttcttgccggttttccccaagctgaatttcaatgcattccggcgcccaagataagagcatgctcaaaagcgcctcttcggccggctgctcttctggcaagccgggcggttcgccttggtagccctgtatttccaacacaaactgccctttcaaatttttatgtacgcgcaccaatctgcaccggcttgtgctctggctgatctgaatacgccaagcatctaactgctgtgcccaatcgtacctgagcaccgccatcgacacaacgcgctcgatgcacttttgccatcttctacgtaggtctgccaaacgaaaccgggcaaagccttccaaatgcaggcttccgtctaccatgcaagcctgcataaggtgtgccaaacggcgtacatagatatcgttttccgcattcatgccctgctgctttgccaacgcctctgcaaattccgccacaaaagactgctcctccatcgacagctgagggagctgcttttgcaccagcgagagtaccagcgtgggctgctctttgcgcacaaaggcgcgcgccaattttctaaacgccggctccacgtccttttgcgccagggtcagctgcaatcgcatctgtttgccgcagcgcgcataggttttgtccttccctttttcaaacgcctgggccatctcatctgcccaatgattctgtttttcctgccagtacaggcagatctctactcttttttcatgtttcacagcactgttaagtgttgccgaaaaaagcactggacacgctagtattttttgttgtagctggaaaaaaatacaacgccgggcaaagccggcgctgtctttatctcagagaggtttttatcttctcccaaatgcgcttacagctcgcaaactctttttcatgaagatgcaccttcatccggtacgcctcaaactcacgcaaaacgtctgcaaactctcggcggttgaaatagctgcaaattttgggcaccacagctgttagctgcgcctgcatatcctgcattacctcgtcaaacgctgcacgctgcgtcaaatatgtgtataaaggcttatagcgcacccatcccacacaggccctataaaaacgggtaacgacctcttccgagctggcgtctatgggctgcagcttattgggcagcacgccgtcgagcaggcgaccgtactggccgaagccatcatggaatgtataggttgggatgtattttacgtttacatccgttaagctcgtgcttaagaaggtatcctcgccccgtgcgcccggcggattgtaaaatacctgcacgcgctccggtacggttaaattgatgcccaagttgccgcccgtgatgaatttcgcaccgtgtacctcttccgctgcggcggcctgttgttccatcaagatggttttatccgcataggtaatgccgcccgcctgcatgatggctttgatgctgtcccagttgagcacatcattgctcagcgccagaataaaagccctaaaatcctgttctgaaaggatatggtcaaattccaaatacggaatgggcgaaatatacccacaatgatagccgtttgtcatatccgcattgcgcaggtattcaatgtgcgattccaaaacgtgctgaccgctccacagcagatagtttttggattccgtaaccgcaaggggatattcatcgtcatccaaaaacaacagctgatccattttttgtgtcatggcgctgtacagcaccgcattgcgctgggccgcatacccattgccaaagcaaatgggcacttcttctttttcaatcactcccttatcgcaaagggcccgggccatatgcaaaatatcgtcctttcccaaaaacgtgcacgtttcaaacgcgtttgctactgatggctccagctgcgtataatcttccacggtggtgtggttatatccaaggtcatacgccacaaataggtgcagctctatatcctgccgtcttagcagctcggattccttcaaatggtaaacataggatttcagcacatcttgaaatcctttccggcctgtggcaaatccaatggccaccttcaacggtttcatgctctatcccttcctttttcatttcggatcgccggcctgtacagtgtatgccgcgatgctgattgtgtaggcaattatacacgcaaatcatgtcataactttggcggcccttctattcccgtaaacatgtacaaaaaagccctttcgctggaaagggccttgctgttgtttatgcatgggatgtttgctcggcctgctctgcaagcggcgcttgcctaaatacctttttccgtacaataaaatagcagataaggtgtgcaccgagcgtcaagaaccacgaaataggatacgaaatatataggctaaattgagtatgctgccattggaaaatggtatagatccaaacgatccggaacaagcacgctccggtaagcgataccaccatcggcaggatggaatacccaagcccgcgaatactgcccgccaatacatccatgatgccgcacaaaaaatacggcacacagaccaggaccatgcgctgcagcccaaaggccaccacttctgcttcggtggtatagatcgaaagaagctgatgccccaatagataagcgccgatgcccatgataagccctatggcagagaccagcgccaagcactctaagagcaccttatcgatacgcttataattatgcgcgcccatgttttggctggtaaagctcagcgaagtctgatagacggcgttcatcgaggtatagacaaatccttcaatgttgctggccgccgtattgcccgccacaaccaccgagccaaagctattgacagaggactggatcaatacattggaaatgttaaagataaccccttgcaagcccgcaggcaagccaatgcgcagtatttccgccaactgctctttatggatgcgcagctcttttggcatcaaacggcatacgccttcgttgttcgtaaggcaaatcagaatcagcgtcgcagagatatactgggatatgaccgttgcgatcgcaacgcccgccacccccatatggaatacaatcacgaaaaacaaattgaaaagaacgttgacgacccctgcgatgataagaaaatacagcggccgcctagtatcgcccaccgcacgcaaaatagccgctccgaaattgtataacagaagggccggcatgcccaggaaaaagatgcggatatacagggttgcctggtcgatgatattggccggcgttcccatccattccaacataggccgcgacagcaaaatgccgatgaagatcatcgccaggccggaaaccgccgcagacaatatggccgtatgtacccctttatgcacaccgtcggcatcccccgccccatagctgcgggcgatcataacgttggcgcctacggagataccgatgaacagattgaccaaaagattgatcaaagaggtcgtagagcctacggccgccaaagcatcgctgccagtataccggccaacaacgatgatgtccgctgcgttgaacagcagctgcaaaatgccagagcacatcagcggaagtgcaaacagcagaattttgctaaacagcgggccgttgcacatatccatctcatacgttcttttcatggaagctttccccttaccgtctgccaaacttgccgggcgaaaaataaagagcttccctctcccattctccccattttcctcccttggcggcagcccacatgaccattatagtgatttgctttcaaaagacaagattgaattttcaactagtttcttcctctatgcctttctcttttgcaagagggaaaaagcaagattctttgcgctgtgcctgcgtctgctccagctgcgccttatgcgataaaaatgcttcatcgtcaaagtatttcgcccgctgcggacaccgagtgatacacgcctggcacttgatgcaaacgccctttaccacggcggggtcctgccggctgatagctcccatcgggcacacggcagcgcacagcccacagccaaggcaacgcgcttggttcgttttgggcttggcctttagaaacttagcgggttttccatccacacccagcggcgtataataggggccgatgggcgagcgccccggcaccgaaatcggccgcgtgggctttgggcatctttcaatgtctatggcaagggcatgtgcaaagacacgaattctttgcagatccgcatcattcggtcgccctgcggccagagctgtagcaaaggcatgctgcgctacgattgcagcggcagccacggtatgaaatccattggtttgcaatgtctcgcacaattctttgagcgcatcgtcaaagctgcggtttccaaatgttacaattggtacggccagcgcaccttgcccgcaaaaaccctcctgtacaaagggcagcagtttatttggcagccttcctgcatacacaggcatgccaaagaccacgatctcctccggggcaaagtaccgcacggtatttctttgatccggagtggtaaactcatctttttgccaaggaacccgcagcgtatccgccaacgccttagccagcgtttctacggcctgcgctgtacagcctgttgcgctataatatacggcccatactctttgaattttcatgccatcccctccaccatcattataaagtgagttcatgccccctacaatcgggatttacccagcgcataagttgccaaaccgttctagaagtgagttggcaagatgctaaaagcgcgtttgcaaacataggcaacgtgagagcggcttatcaaaagaggcggagaaagggcacgcactttcctccgttttataaaaaaatgaatcagagcaaaggccgctttgctccaacgtaggaagcgttgacaaaacgcatatccagcagtacattttcgggaaggaacggtagcctgtacagttttcaggtaaaattgtggcgaaccaaaaaggctcgccgcgacgtgtaaagagatagcaaaaaagatgtctgcgaaaagttttgaaatagactcgaacccacaaaaagttggtagcgaaagagagccgtcgcgacagcgtttacaaccgagcaagcctttctgcggaagaggaggaacagtggagcgggtgactgattttttatgaaataaaaaatcggaacgagcgtaactcgttccgacatggcgccggaagcgggacttgaacccgcacgctgttgccaacccgggattttaaatccttttgtgcattattcaatcttatattagaacgttcaacatgatcgaaactgactttacaaaaaatctgctagatcctagaaatccagtatattcaggcattattccttgctatttatcataatggtactttcttcgtcaaagcaaaaaaataatttgcggagaaaacaggaagattgcaaggagagaactaggagagaactgcgagagaactcttcaaatcgctctgttttttgtagaaaggagatacgagttgtgaaaagaaaaaaacccccgtaagataggggctttgaaggtatggtgccggaagcgggacttgaacccgcacgctgttgccaacccgggattttaagtcccgtgcgtctgccgattccgccattccggcctagcaaatattataatgcaaaacaagcagctttggcaacctttttctaaacgcctatccacatcatacatggttttttgttcgcggacaaaaacaaggttgtccgtttttccctacaatggtaagataaagtattcttccatatatgaactgttttaagaacaggaggagcatggatatgtcgatccagaaagaagaaatatcggtatcatctgcctctacggtacaaaaagtggtttcttatatagagcagaggatctgcgcgcaagaactttgtccaggcgaccgaattcctactgaaactgaactttgcgcactgctgggcgttagccgcacctctgtgcgagaagccatcaagatcttagaatccatgaccatcatccaggtgcgccgcggagacggtacctatatcgcccgcccccaagatattaccttttatacgccatggaaattcaaaatgctgctggaaggcaccacctggcaggaggtgttggcctttcgtgaacagatggaattcagcatcctgcgctgcgcttttctgcatattaccgagcaggatctgtctgctctctcacagaacttggaaaaaacgcgctggatctgccagtatgagccgggaaatatgcaagcgctgattcagctggatgatgaatttcacggcaccattgcacataccacccaaaacaaaatgctggaggatatgtatcaatttacctttgacatcgtatctccgttgatcttagaggatacccaaagcgaaaaagccgttgaatccacgctggttgtgcatcggatgctggtagaagcgctggagcgcaaggatctattcttggcagcccacgccgcccatcaaggcattttatactgggaggagctggcacaaaagcagcccagcgaccgctttctctttcacaaatagagaatatcggcctgatttgtccaaacgagaggcatttctatatggataaaacgaccgagcccacttactgtgttggctcggccgttttcttttgcttggaaagcattacccttctttggtcaagtagatttccacattcccctggggcaacaccagctgatctccctgtcttgtcatcgcttgttcggaaacgtcgtcccgaatgataacgccttcctccgttacctcataggttccactatacgcttggcccatgactaccatttcgcaggtattgtccgccttaaactcaacggaaaggttcatcgatggcatcatctgttgaatctcctcctgggtgactgtaacgccgttggccttcccgcccgtcatgttccattttcccacatacgcttgattgtccgtgctgccgcagcctgctaggcacagcatagccagcaacagcagcgctgcaaacaggcttgtcctttttttatgcagcattgttacctcctcctatacattggcatagctggagtatagcggccatggtgttcattgacaacgttgttcggcttgcctcccctactttcgcgcaaatttccgttcgttctcctttttttgaggccaatagcaaatagaggaaacgaaatcgtttcctctatttctcatttttcaatgtggcagtctccgctgctcgtctgaatggtatagacaggagccgcctggccggtattttggcccgcaaaatcgttcctcagatctccgctgccggtatcaaaggcaagggtaaatacgctgttttccggcagatgaagctcaatatcccccgatgttgtcgtaaaggacaaggattccggctgtgcattgaggcccacctctatttccccgctggtgctatttgcttgtagatgcgtagccgtaccggaaaatgcaatatcgccggaggtggtagcaatcttcgcttgctgcgctgatagctgcgaaatctccatatccccgctggtcgattgggctgtcagctgcccgatctctccttggccaagcgctatatctccgctactggtttgcaggctcatctgctctaatacgatgccgccttttacctcaatgtcgccactggtgctcgtgagctgtaggctctgtactgtaccggaaaactcaatatctccagcgccgctgtctatggccagggccaacgcatcggcctttacaccctccactttgattgtaccgctctgcgtatcgatggaaagcgctccctgatatcccttgggaatctgtatttccagatctgacaaacgtgcgtttcctaggaaaaaatcccaccagcggacgcttttttccgaggaaatctccagcgtatcccctgtttgctgtgtagaaaagtagatcatgtcctcatgctcttctgccttttgtaaaatatggagggagctatcttcgctttgtgtaaggatgatatcgcccaggccccagtctatccggatctgtgatacgccgtcacccatcccctgttgctttacagttgtgaagttgtttctgttggaaacgccccagtgaaacccaggaccattggccaagccccagatcagtgcgcaaagggccagcgccaaaataatgctccaggcgatgacccgccgtcttccgcttcggtaactcattttctatcctccttcatctgtatgatgccctttatgatattttctaccgccgccgcggcgataaataggatccaggaatacccccagcttccgcacaaaaagctaaagagaaaataggctacgacgaccagagaccaatatgcgctgtgaaacgcctggaacgcttttttctggtgattggtcttcgtgcgccactccttgaaatcctctacgatattttcatcctgtttttcataaaccggccgtgtcatgtggttatagatcagcatgccggtagcgcctgcgatgcatccgaaaaacaacacgagacccaagatctccagcccgatgctctcaaaaaggatgatcatcaccgggcttaaaatatacatcataacagccgctgcagtgagcagcgcgctcttctttcgttcctgttcactggggccctgcatgctgtgcggacgtacgctatccaccagctcggaaagatcgcccagccccgtgattacggcattgtatgcttcttcttccgatttgccatgtaaaagctgctcgttgtatttttcaatgagatttgcggtcagctcctctttaagctcgtttaccttcttgctttccggcacacccgcaaattcatgatcgatataggcgcggatcttgtttaccatgatttcgtttcctccttaaaagatcagctgttctattagagctttggtatcgctccattgtgccaggcactgcttgtaatatgcctgcccttcctttgtgatggcatagtacctgcgtctggctcctgttttttcatcaccccaataggaaaggatatagcccgcctgttccagccgccgaaaggccgtatacagcgttgcttcctttaattcatactgccctttggtcttttcctgtatcgtcttgttgatctcatagccatagctatccttatccatcagccgacgcaggatgatggcctccgtatagccgcgaagcgcatccgaagcgatgggcatgcaatcaccttcttcctatctatactatacacaaatatacctcatctttcgaggtatatcaagaaataattttgatgttttttcctcttcttttttccctgaactttcgacaattttaataaatcgataacaaaaaagtgcccaaaacacatgggtggtatggtataataataataatttgaacgttccttttctccgccgtatttatgtacgatttctatggctcgtctttggctcatacactttagcgcagccaaacagcatacaagcgggccgcctattgataatttttttgtgtggaggtttttttcatggcaaaatatatcattgcccacgatttcggcaccagcgcaaataaggcgtctctgtttaccacagagggcaaatttgtaaagaccgcaacagccgaatatcccacctattataccaatcaaagctgggttgagcaggatccggaggactggtgggcggccttttgccaaacgaccaagacgctgatgcaaggcattcccaaagaggatgtgctgtgtgtcagctttgacggcacctatcccaactgtctttgtgtagataaagacggcaagccgctgcaccgggctatgatctggcaggatacgcgggcctacaaacaggcggaggagatcacgaaaaagatcccggccaagtacacggccgaccgagccaaccatgtgatgcagacagaccgcacgctgccaaagctgctttggatcaaggaaaaccagccggaaatctttgccaagaccgcgatggtgcttccctgcgtttccaactatatcgtgatgcggatgacgggcgtggcctgctgcgactattccgtcggtaagggcacggccatggtaacaatggattattccgactatgcggatgaaatattagaagctgccggcatcacacgcgaaattctgcccaaactttgcgaccgcaccaccatcgctggcgaggtaacggaggagtttgccgaccaatgcgggctggctgtgggcaccaagctggtcgtaggctcgcatgattcggcctgtacctctattggcgcaggcatctccgaaccgggcgactgctatatgaatggcggcacctctgccggcattgtcttcaagcggaagccgggcgataccacgacaggcggccaaaccgcctcttccggctcttccttccgctggctgcgcgataccatttgccaatatgaacaatttttggccaaaagcgaagggcgcagcgcatatgatatcattgacgaagagctggctgaggcgcccatcggctctcatggggtgatgttccatccctatctggctggcgaacgcgagccgcgcaacaatccgcgcgccaaaggctcgtttgtcggcatcacgctgacgaccacccgccaggatattatgcgcagcgtcatcgaggggatcgggctgaatatcaatttgattctgcaagaggcgcgggacagaggttatgtcgtagaccgtatgcccatcgtaggcggcctgggcaaaagcgaaatcgtcaagcagatttttgctgacatcatgaacgtagagttaatcacttacgaatatatggacgaagcggctactgtgggcgccgctgtgctgggcgggatggcccttgggctatatgaggatgagtctgccgtgcataaattcatgaaggtaacaagcgtaacaaagcccattgcggaaaaccacgcagcgtatcaaaagctaatgcccctgtttgaggatgtttacaacgcaatggttcccctctacgaaaaaatgtaagaaggaaaaaaggacggctgcggccgtccttttgcatgcacatcctgcggtggaagcgtaggccgccgtctgcacctagcttgcaacgcctgaagatagaattttcctttgcgatacattcgcggcatcgccacacactcctctttcggtatttgaaaatttctgttgtatctatgcgctctaaaaaaacaagcatcctctgtgccaaaaaaggacgggaatcccgtcctttttgaagttgttaggcgttttcttccgcgtattgctttaatacctccggcggcgtcatggtgcgtgccgcaatttcctctaaagaaagcccttgtgcctgcatgcgcttaacaaccgcatgcatcggctcccccacctcgatgatatgatcatccggatcataaaaccgaatgactcgctgcccccatggcatttgctttgccgaatgaacgtaacttccctctccataaaaccgcaggcgttccaaaaagccgtccagatcctccgactcaaagtagagctccgattggcagcctccgtagcagatctgctccgcttgtaagccggtgaaagccagccagctttcctccgtctgtaaagcaaacgggccttccatggttacgttggcgcccaagtccgccagcacacgtctatgcaaaacggtttggtaaaaagctttgaaccgctccatatccttgaccaccagcaacggacaaataaaacgcattgtcgtccttcctcctcattcttttttcttagtataaagaatgggagagccactatgcttgtaagatatggacaaaatcaaggctgtgtcgtccgataccctgtgttaaaatccactaagttttccagcgcatcgccggataggtatgctcttaggttgcgttggcaaatgccaaggatgcgcgccagcgtaatcggtagatgatacccccctgccacatgaggcgtaatcatagcgcccggcgcatgccaaagcggatgctttgccggcaaaggctccggctccaccacatccaggcaggcgccagataaatgcccgctttccaatacgcggcacagggcattggtatccacgatattgccccggcctacgttgacgagcaaagcgccctgcttcatactcctcagcttggcttcatcgaacaggtgcttggtctgctctgttcccggtaggcagatggccacaatatccatctccggcagcagggtctccaacgcatccatctggcaaaggcgctctacgtatgccggtttttgggcttggctgcgacggatgcccacgacctggctgccaagcgcatgcatacgcttggcaaattctccgccaatatcccccataccgactaccagcgttttgctgcccaccacagagcagacagggccttcgtcctgccatgtgccctgcgcctgatgcgccagataactaggcagctttttcatttggcacagcaccatggccaccatatgctctgaaatggccaagccgtatgcgcccgaagcattggtaagctttacgccttccggcagcacgcctggctttgtatagctctccgcgcctgcggaattcagctgaagccatcgaagcttttccgcgctcttcaataggctggccggaagattgcctaagattacctctgctttttttacctgttcctgagtgatgtgtgctttgtctgtataggtgaagtgtgcatgaggggcaatctcagcaaatatttccctttgcgccgggctaaccggcagcgttgcaatgatttccatggttattcctttccgtgctctgcatttagatgcgttttgtaaaaatccaggtcatggccgatatgcctgcgcatgcggcattctaccaggtcggcgtcttcgctgcgtatggcttgtaagatctcgctgtgctccgcaagataacgatcctccttatggtaggtttcaaattccctgcggcgggccagcagcgaaagatcgcgctggcgggcgatcatgccacggatcagcgcattttggcagtaggataccaccatctcatgaaaccgggtattttcctgtaccacacgctgcatatccccttttctatgcgcctgtttgcaatgctgaatacactgctccagcgcgtttagctccgcttcgcccatgcgtcctacactgtctcgggcagcataggattccaaaaccagacgggcctgataaatttcgcagatggcctcgccttccagagggtttaccattgtgccgttgctgcaaggcaccaacaggccatcgcgttccaacatgcgtaccgcttcgcgtaccgggctgcggctgacgccaaactccttggccaaattgtattcattgatgcgcatgcccgcagcaatcttgccagagaggatatcctgctttagcagcgtatagacctgcaagtgataggccacttttttcacagtacgttgttccatgatcgtccttttctattttacaaaatgggccccgtgcgcttgaatagccggccacggtgctgggtgttggtataaacgccattttcaatgacaaatttcccgcgcgataccgtatgcactaccttacccgtcatctccatcccctcaaacggcgcataatccgtctgcatatgatggtctttggcatggatggtgtatttggccttggggtccagtatcgcaaaatctgcatcgctgcccacctggatcacacccttttccgggtaggcgcccatgagcttggccgccttggccgaggtaatctccacaaagcggttgggcgtgatgcgccctttgctgactccttcgctgaacagcacaatgccacgcgtttcaatgccgggcaggccgttggggatcttggtaaaattgtctttatggctatctttctgctcgctggaaaaatcggtatggtcgctgttgatcaggtcgatcaggccatggtttaccatctcccaaagctttgcctggttttccaaatcgcgcatcggcggcacgcaggtataacggcacgcgtctgggcgccggtacacgctttcatccagcgtaaggtaatgtgtacagcactcaataaacagcggcatggtctgttttgcctttgcaatggcaggtgccgcaccggaagccgtcagatgcgccacgatcgtcggtgcgcctgtatcctccaccatggcaatgagcgcatacaacgcttccagctctgtaatcggcggacgcgtcttggcaagatcgatgggaagcgtatgccctttggccactgtatccgcgatatagcggtcgatcaagtctgcgctttccgtatggaccatcgaaaggccgttttccttggctatgatgcggagcacctcgtagatgccggctttttccagcatccgcccgtaattgaaaatggtaaacatctttacggatggaaagccctgctggatcaattcacggatctgcccatagttttcctcgttggccttggtgagattggaatgaaaggaataatcgataacgctttgccctttgatctcttccagctttcgttccatggcctgtgccggcgtttcatcgccatatggaaagccgaaatccacgatggcggtcgttccgccataggcagcggcaatgctgccgttgtaatagttatcctgcgaagggctagccccaaagcgcttgttcatgtgcacatgggtatcgatcatccccggca

SEQ ID NO: 4545 - DNA, 10287 bp, Unknown
  16S sequences of unknown bacteria
ctgggattcagaaaatctccaattacccggcagatcagaacttctttcgtctctatggataaaaccgaaaaaatattatacggatctgtggcatttgcaactgttttattttgttttacaactgtattcaataactctgtttccatctctgtttacccaatcatcgtcaacaccactgccaccacgaacacaggcctcaggaatcttcactcccaaggcctgttcctattacatcttgttcttattacagtttcatagacagagagatccgcttcttcgcgacatctaccgccagcactttcacatccaccacgtcgcctactttgaccacatccagcggatgtttgataaagcgctcagacatctcagatacatgcacgagtccatcctgatgaacaccaatatccacaaatgcaccaaaatccataatattgcggacggttcccttgagcaccatccccggagtcaagtctttcatatccagcacatcgcttctgagcaccgggcgcggcatctcgtcacgagggtctctggccggtttttccagctcctgtacaatatccttcagagtcagttcaccaacgcccagctcttctgctgttttcttcggctcacgcactttcttcgagatgcctttcaggcctcctccgataatatcctctgcggaatatccaagagaagtcagaagcttcatagctgcctcatagctctccggatgtacactggtagtatccagcgggttgtctccattcatgatccgaaggaaccctgcacactgctcataagccttcggtcccagcttcggcactttcagaagctgtcttctgtctgcgaatctgccgttcgcttctctgtatgtcacaatattttttgccagcgtcttggtgatgccggaaatgtactccaaaagtggtgctgaagccgtattcagatcaacccccactttatttacagagtcttcaaccactcctccaagagcttcgctcaatctcttctgattcatgtcatgctgatactgaccaactccgatagccttcggatcgatctttaccaactccgccagtggatcctgcagtcttcttgcaatggaagctgcacttctctgtccaacatcgaaattcggaaattcctctgttgccagcttacttgcagaatatacggatgctcccgattcactgacgatcacgtactgcaccttctccgggatttcttttaaaagctccacgatcacctgctcagattctctggaagcggtgccgtttccaagagaaatcaacgtaatatggtatttttcgatcagctttttcaaggttgcttttgcttcttttaccttattctgaggtgcggttggataaatgactaccgtatccagtacttttccggtaggatctactactgccagcttgcagcctgtacggaatgccggatcccagccgagcacggtctgtcctgcaatcggaggctgcatgagaagctgctccagattctttccaaatacacggattgctccctcttctgcctgctcggtcagaaggttacggatctcacgctcgatggccggtgcgatcaggcggctgtaactgtcttttaccacttcttccagcgtcggagatgtgattggattatcccttgtgattacacggctttccagataacttaagatctccggttccggtgcaacaatctttacagtcagcaccttttctgcctcacctctgttcagagccagcgtccgatgtcctgccatcttgctgattggctggctaaaatgataataggtctcatatacagactgctctttctcatcttttgcttcagaggtaatctcgccctctttcagtgtcttatttctgatccaggtgcgataatctgcttcatcggatatgctctccgcaataatgtccatggctccggcgatggcttcctgtaccgttgccacacctttttcctcagacagataactttctgcctctgtttccagcggtgtcgttgtcatctgaagaagaataatattggccagaccttccagtcctttctcttttgccatagtcgcacgggtccggcgtttcggacgatatggacgataaaggtcatccacagccacctgtgtctgagctgcctcgatcgctgctttgagctcttccgtcagttttccctgctcctcaatgctggagatcacctgtgccttcttatcttccagatttcgaagataggtcagccgctcacccagatcacgaagctgctcgtcattaagcgcaccagtagcttccttccggtaacgggaaatgaacgggatggtatttccctcatcaatcagtttgactgctgcttccacctgccatttcttcacctgaagttcttctgtcagtttctgtataatatccataaaaaatcttactccaatacttctttgattgctgccaggaactcatcataagtctcaaatgccttcagttccgggtaatcctttttgatctggtcggtagtacggaacaaaaatcctgcccggcttgctttgatcatgcccagatcattaaagctgtctcctgcagcaatggtatcaaatccagctgactgcaatgcttttacagtggtcagcttggaattctcaattctcatcttaaatccggtaatggttccgtcttctgccacttccagagagttgcagaacagagtcggccatcccagcttcttcatcaacggttttgcaaactgcgtaaaggtgtcactgatgatgatcacctgagtcagagaacgcagttcatccaggaattcttttgctcccggcagcggatcgatcttctcgatggtttcctggatttctttcagcccaagtccatgctctttcaggattccaagacgccatttcatcagtttatcataatccggttcatcacgggtagtacgcttcaactccggaattccactggcctctgcaaatgcgatccagatctccggtaccagtactccttccagatcaaggcacacgatatccatcattttttatttcctcctcttcaagctcagcctgccacacggatcatgctgataatatcaagattttttgcttttcttgcaaatgcatcttcagacatgacaggagtcatgaacccaatctcacctttaatctttgcatcgatcatctccacatcaccaaatacttttgcatctttggcatcagatttcatacggacaaagaaacgatgggtcatctctcctaccggagccagttccagtttctgcggattccagaacgtggtaatgatctttccaagatgtcttgctgcatccaccatatcaccggcaacagcactggcagtcggcagtttacctgctccgcttccatagaacatggacgctcccagcatattaccttccacacatactgcattaaatacatcatttaccatgtagagcggattctctttacgaacaaaagccggagctaccatgacacagtaagtatccccctgcttcttgctgacagccagcagtttgatagcacagcctgctttttttgcatatacaaaatcttcagccgtcactttggtaataccctctgtataaatatctttaaaatccacctgattaccactggcaagagaagtcaggatcgcaatctttctgcacgcatcccagccttccacgtctgcttccgggtgaagctccgcatagccctttgcctgggcttctttcagcacatcatcataattcagtccttctctggacatcttggtcagcatgtagttagtggttccgtttaagataccagagatctctacgatcacatctgccgtcagagaagaattaagaggacggataataggaataccgccgcctacacttgcctcaaacagataattcacctgatgatccttcgcaatctggatcaattcagcaccatgctcagccaccaattccttgttggaagtacacacactttttcctgcttccaggcagcgtctggtaaactcatacgctggatgaagtcctcccataacctcagccacgatcttcacttcatcatcagtaaggatgtcttcaaaatcatgtgtcagtacatccatgaccggatctcccggaaattctcttaagtccagcacatactgtactcgcagttcctgtcctacttttttgtcaatgctggtcttgtttgttctgaacacctcatatacaccggatccaacggtgccataacccataattgcaacctttatcattggtattttactccctgcctaatattttgagatatctgactccctgctgctgttcaatcttttcgatcatggcagatacgtcccctgtggtagaaagcacctgaacgctgagggtcagcgtggcgattccgttgatcggaatcgtctgatgaattgtaagaatgtttgctccaaattctgcaataatgttcagaaccgtggacagaagtcccggttcatcctccacctgaagcataaaagtaacagtctttcctttcgcctcatcatggaaaggaaagatgtcctctttgtatttataaaatgaactgcggctgatgccaagctgatctgccgcttcctggaccgtcatgccaggattgcaatccagcagacgcttggcctccaccactttcagcagaacctctggcactgcttttttctttagcacgaaatacttgctgttttccgtcattcctgttcctccggtgacagattgatccatttcaggtaagcattgataaatggatcgatctttccatccatcacagcatctacgttgctgacttcgcagctggtacgatggtctttaaccagtgtatacggctgcatcacatacgaacgaatctgatttccccaggcaatatcactgacttctccgcggatgccggataatttctctgcctgcttctgctgttccagaaggtagagtttagccttcagcatctgcatggctttgtccttattctgatgctgagaacgttcattctggcattgtactacaattcccgtaggaatatgtgtaatacggatcgcagatgaagtcttgttgatgtgctgtccacctgctccgctggaacggtacgtatcgatccgcagatcatccggattgatctccacctcaatgtcgccttcaatatccggcatcacatcacaggagacaaaggaagtctgccgttttccctgtgcattgaatggagaaatacggaccagacggtgcacacctttttcggatttgagatatccgtaggcattttctccatgcacctcaaaggtaaccgatttgatacctgcctcatcaccatccagatagtccagcacttctacggtaaaacccttacgctctgcccagcgggtatacatacggtaaagcatgcccgcccagtcgcaggattcggttccacctgctcctgcattcagcttgatgatggcatctgtgctatcatattcaccagacagaagagtcttgatccgcatggcctcaaatgcctctgtaaactgatccagttcttcctgaatctctggaatcagagattcatcgttctcttcatagcccatctccaacagtgtctcgatatcttcgtactgttgctccaggctttcatatttctgtttttcttctttgagaatgttcagctccttcataccttcctgggatttttccacattgtcccagtagccaggtgcctccatctcccgttctaattcttcgatcctgagcgtctttgaagccaggtcaaagtgaatccctcagttctgtcatgggttttgcgtagctgctcagtgtatatttaaactgatctaattctaccataaccacaccttctttcttttaaaatttatgatactatcaatcgtttttacttcatcaatttacgaccacagcactgcttgtatttcttaccgcttccgcaaggacagggatcgttcggatatactttatctgcagcacgctgtaccggttttttcccaagggaatcatccttattggttccggttacctgtgcaacttcctcgcgctctgctttctcttcaatcttcacatgcatcaacagacgtacggtatcttcctgaatgcctgctgtcatggcctcgaacatctcatagccgctcatcttatactcaaccagcggatctctctgtccgtatgcctgaagaccaataccctgtctcaactgctccatatcatcgatatggttcatccatttgcgatcaataactttcagaaggaatacacgttccagctcacggatcatctccgggttcgggaactctgcctcttttgcctcatacagcttcgttccttcctgcttcagtgcatgcttcaactctgctttattcttacagccaatgcgttccacagtaatcatctcaaaaggaatgataggaagcagtgtctcattcagacctgaaagatcccattcctgcggatcctgatcatcaccgataaaggtatctactgtgttctctaccacatcagaaatcatcttgtagatagaatctctcatgctctcgccgtccaatacccgacgacgctctgcatagatgatctctctctgctcattcattacctggtcatactccagcaagtttttacgaataccaaagttattattttcaattttcatctgtgctttttcgatcgcacttgtaagcatcttatgctcaatctgctcgttttccggaactcccaatgcattgaatacatccatcagacgctcggatccaaacagtctcatcagatcatcttccaatgagatatagaaacgtgattcacccggatctccctgacggcctgcacgaccacgcagctgattatcaatacgtctggactcatgacgttctgtaccaatgattttcaatccaccagctgcctttgcctcatcgtccagcttaatatccgtaccacgacctgccatgttagttgcgatcgtaacagctccatgctgacctgccagtgctacgatctcagcctctctctcatggaattttgcattgaggacttcatgctggataccacgcttctgaagcatacggctgagttcctcggaagtctcgattgtgatcgtacctaccagcaccggctgtcccgttgcgtgcgctttctcaatctcgttgcagactgcaaaaaatttctctttcttggtcttatatacggcatcatgcaggtccttacggataaccggcttattggtcggaatctccacaacgtccattccatagattgcccggaactctttttcctcagtcaatgccgtaccggtcataccggatttcttgtcatatttattgaagaaattctggaacgtgatatttgcaagagtcttgctttcccgttttacttttacgtgctcttttgcctcaattgcctgatgaagtccatcagagtaacgacggcctggcataatacgtccggtaaactcatcaacgataaatacctgatcatcttttaccacataatcctgatcgcggaacatcagattattagcgcgaagtgccagctccatgttgtgctggatctccagattctccggatctgccaggttctcgatcttgaagaactgctctaccttcttgataccatcagctgtcagatgaacgatcttatctttctcattgacgatgaagtctccggtctcctcgatctcctcacccatgatggcatccatcttggaaaattccttgcttgcctcaccacgggtcagcgtatgagccacataatcgcacaactcataaagcttagtggatttgccgctctgaccagagatgatcaacggagttctcgcctcatcgatcagaatagagtcgatctcatcgatgatggcataatgtaattctctctgtaccagctgctctttgtaaataaccatgttatcacgcaggtagtcaaatcccagctcgttattggttacataagtaatgtcgcaattgtatgcagcacgtctctcttccttggtggaagcattcagtactacacctaccgtcagtccaagaaactcatgaaccttacccatccagccagcatcacggcttgccagataatcattgacggttacaacatgaacgccctttccctccagcgcattcaaatatgccgggagtgtggataccagcgtcttaccttcaccagtcttcatctctgcaatacgtccctgatgaaggatcataccaccgatcaactgtacccggtaatgctccataccaagtacacgctttgctgcctctctgacagttgcaaatgcctctggaagaagatcatccagagtctctcctgctgccagtctctgcttgtattcttttgtcttatctttcagttcctcatcggtcagcgcctgcatagtcggacgcagtgcttcgatcttatcaatggtgggagcgatcagtttcaattctctctcactgtgagtaccgaacaatttgttgataatattcatattctactcctgtctatctgtatagatcctggcaaaatacccttctttttgccacatgcgcccattatagcataaatctacaatttggtaaacttaaaaaaggaccccgacaccctgcaataaggtgtcagaatccttttctcctaatgtattaattttgaatcttgatagcgtacaaatttctttgctattttctttgttttctctacatttttacgtgcatattccatacaccgacctcccttttttgcataaaaagcagctaccctatttttttcatagactaactgctcatgtttttgtttcatattaaatttatatttcccttttccgtgaccggacactggctcaataatatccgcctttaccacattggaaagaagttttgaggcacctgaagctttcaactcaagaagttccataactgcacttcttccaaacacctcatcataaccaaacttttcaaaaagtccacttatatgaatttttcgattgtgaagctcatttttctcgttcaaaagtaaatttcgaggaaacacttccagatagtcttatgattcaatcttactaaatttatgaagacagtctgcacaaacttgaagttgtcattttgttgtagttacttcagttgcaaaaatcttgctgcataattccaaatattcctcataagatatttccgttccattcaatgtatatttttctttgccttccacattatctacatcaataagttcttcacaaaaattcatttctgcaactaaattatctgctccttcaaatttttccatatggtatgcttcatatcctgtattcattctgttgctgtgcataatccatacggcaccattataaacaacataagaaagctcaagcgcattaccctctcccacagcaaattcgtagaccttattatcacgtgcatcaagatatatgccaccataaggtccgcaaataatcagttcattttccccatcattatcaagatcgactctttcaccaatagaataagaatcccattcgtcagaatccatatctaaatcggtaatataaaatgccgatgtcgaatcctcggaactgattgcatttattgaaccattaacaaacaaatctaataattcttctgctgtcatttctgtatctatattctccgtttgtgtgttggattcttccgcactaattactttattttcttctttttccaaatttgtactttcatctatctgcacactgctttcttgctgtcttgtaggagattcatcagtagtgacaacttcatctcctttttcttgtccgcaagcaactacatttaatgttgctagaaaaacacataccaatactcccatctttttacatctgctcatgtacataccctccgataacttccgattgagatttcacctgttttaagagatttaataactgttatattttgttattaaattctccgcaaacccttgaaaacactggatttgtcgcaggtgagctttcccttattttttcccttgtgttatatcgtcccatcagtgtttatgaactctgataagggcaaaaaaattatataaaacagtataacataaaataaaagtgacatggtgaactgattgaaatgcttcttaatttttgctactaatgattgattaaatgataaggagatgggatacgatgagaacaatatttgcaggatacaatccacaacgaaacagcattgacttcacttgcagtcgatgaaccacttgaatatgcgagattatatcttgagggcaatttacagatgtgggtagatgcagaagattcattagagttataaaatgcaagcagcctgtatgcttcattacacacaggctgcttaatcaaatttattataattgatgaaaaat

SEQ ID NO: 4546 - DNA, 32759 bp, Unknown
  16S sequences of unknown bacteria
tcatcgcctcctttccacaaaatgtgcaggggtggtgcatttatttctaaggcgggaccaccagccgccggagaaggtatttcttcatcgaaccgccctcaacgaatttgctcagaacggtcatagagcaaatctccatttctgacctttgcatgactgagaatcttgatctgtccctttgcctgactgtccagagctttttcatagcccttatctgacaaaaacaggcgggttcgttcacctttccagcccaccggggagtcatgcgtcagcacatcaaaaataatcatgtgccgggtgttctcagcaaatcgctggagatccatgtagtcatggccgtgatagttctgcgctccagctttctggcgcatttcttccatcagctgaccgattgttttgccttctggcataaaactcacttcctttcccactctcatacaaccatcaaaatcatgtctctcagctgagcaaagtagagtttgccttgcggggttatcagcgtataggagccgatatgcccgtgattgcagtagtctttgacacaaaacagtccttcattggctggctttgcatagggcagtacattaccggatgcggtgcggtacacaaaacgcttttccagaaggaaacggacaaaccgacgctccgggacaagcaactctttggcggtggtgcggaggttggtactgtgattgaggtcgatgaacaaatcataaaaggctgccttactctccagcagggcattttcctctcgtagcgacgcattttcttcccgctcagcaagcagctcggagcagagctttatcagagcttccggagaagtggctatctcccacaacttctcttttgtgagataggctccgtgcttgcgaatgacaggtagaacttcatcaaacacccattgttcaaaccgttccgctgacggcagtttactatgggcgatcagacgatatagatcaccttcggggataaagagcatttcgaccatttgtaccgcggggcttccatctgcctttttcccagtctggacccctatggaacatttcgttccacccctggtatggtcgcggacggctttgcgtggattggtatatcccagcgctgttgccacatctgtaccgcaaaataatactttgccattctgttccaaagtgcgaatgcttccgaactctggactattgaaaatttcaatctgattcatgctgtgcctcctttggtgtaatacaaaagcggctgattaccagccgcctgcgtgcatatcgtgatttaccagtgaagtgtagtggttattcatggtggtaggagcgttgaacagcactgcaagcaggtactgcttgatgttgtgtacctgggtggtgttcttttgcagacagtccatgacaaactcgatgtgagagctgtccagcttcaaaaagcgggagcgtacaatttcatgaggaaagtccgcaccagagatccgggtggtctttcgtttggcacagaccgtttctaccaacagctctacgatctcattcaggtcatccaggtagagaggataacgctgcttcagacaatcatactcgatattctccaaaatcaattcccgataattttctatctctgtgacagacatcgcatcccttcctttccgttccggcggtattaccgccgctgtttcccggaagggaatggaatcggtatttgatccatgagtattttgtttttgggtatttgatttcttagtatttaattgtgttggattttccggtaacggatttaccgctgacgggtttaccgttatcgggttttccgacaacggcttatccaacatcggttctccctcgatgggacgctcaaaaatggtatactcattggctgcgaatttaccagaagcatcagttgtctgtctgcgccgaatgtatccggctgtttcaagctcattgacagcagagcggattgcatctttgctttctcgattgatatagctgagtcctgacagcgtataatcccagtcatcaggcagagataacatctgcgacaagagaccctttgccttcaaagaaagtcgtttgtcttttagatgaaaattgctcataaccgtgtaatcgccagtgcgttctacacgaaaaacagccatttacttcactcctttcatttctcaggtatgaaaaaagccgcaattcataaaagaattgtggcagcggttagggtctgtctgtatctttttttcttgcgtcggtaggggcgttttggcattggtggtttatcaaacagatccctttcctgagaaaatggtaaggtttgaaaaacacgatcaatctcggtggattccatatcacgctgtgagcggcaatcttcttgaatagcttctcggatttctcttacagtacacatattcattcctttcctttcgttgtatcggttatgaacgacggtgttttttaggcttgaagtcgaggatatgcccctcaataacatgggcatatctcttaattttgatttctcgacgctgctggctttgcagagctgactgatacccgtcctctgtgagaaaaagcctcatttcgtcaccaggttctccataagcagtagggcgcaagacagtaaactcaatcatccagaaagtgctgtcccaaaatcgctccactgcaagaatgttgtggcctttcagttcccttgctgcaatatctttcataggctctcccttcatcgttcctgatctcgttggcgttttttctgccattgttccagcagtttaataatggtttcctgcattttggccggtgtatagcttttggggaaatactttcgcaaggtatcgctgctcaaggtcactttatccagatcaccctttttttcctctgacatgatggcaagcatcacatcttctgacaatttcccttcctggctgaactttttcattcgctgagcctgagagagagaaggggtagcctgctcatagtccattgtttccaccagcatttgctgttcgtccggtttcaaaaaagagagttcataggctgggttaaatgcgattttcttttcatccaccatatccaaaagctctggaatcagttcagtcaaacgaacatatcgcattacctggataccgcttcgttcaccggcttcttttgccacctggtctctggcgctcaacttctgttcaacttgaacagaagtcaggtctgttcttgctccttgatgtttaatggcttccagcttcattttgtaggcaaaagccctttcactggggagcagattttctcgctgcaaattgctgtcaaccataataattgtggcagcatcgtcatccaagtcgcgcacaatgacaggcatggtttcttttccggccaattcgctggctctgcggcgtctgtgaccggctaccagctcataaccgccatcaggcagtggtctggcaatcgcaggaaccaacacaccatactttttgatgctgtctgcggtttctatcattgcatcatcatccttgaccttgaaggggtgatccttgaacggatgcagttcagataggggaatttcctgaattttttccagttgctcgtcttgccgactttcttctgtagaaaacaggtcatctactgaggccagctctatttttttcgcgctgcttttcaagtttcaatacctccttcgtcagatttttgtagccctcagccactttgccattaggatcatgggcataaatgctttttccttcagcactgatttctttagccctgacagaatgaggaatttctgatgtaaacaccttgatcttactgccataggtttcgcgcagaagagcggagatttctttggcaaaattggttcggctgtctaccatcgtcagcagaatcccatcaatttgcagcttgggattgatttgtctgcgaaccttattgatagtttgcaaaagctgctccaaacctttagctggaagatactctgcctggacggggattataaccctattagcggcagccagtgcattgaccgtaagcatacccagggagggctggcaatcaataaggatatgggagtattgccccttcagcgtgtccagatattgtcgcagaatggtttctcggctcatagcgtttaccagagatacctccataccagatagctggatgtccgcaggcatcaggtctacgccctcagggtggtgcaggataccctcgccgggacgaattggttcatccatcaaaatacggcccatagcgtctgacagtgtaaagggcagcttatcaggctgaggattgcccaagctgatggtcaggcttccctgtgggtctccgtcaatcagaaggactttcttcccggactgcgccagaccaattccaagattggcacaagtggttgttttgccgacaccacctttttggttggctatggcaataatctgtgtattcatgatttcacctcatttctttctaagtttagatatgaaaaaaagtgcctgctttacctttcctgagaaagataaaacaggcactttcactggctcaatacctcttgtaatgaacctctatgtatggtaaactatgtccacgataccatgaatataattaagtctcgacgggaattgaacttttggctaacgccaaatttcgcgcctttgcaaacagagtgcaaacaatagggggctaaaatcctttgtttttgcttgattttgcttgtacaaggtttatagagaacatggagaaaagccttgatataactgcattttctttatccctgttgatagggaatatatgcactgggtccatctcctaagcggtaggtcgggtgttcgaatcacctcgggaacgccaaaagaaaagacgccatatggcgtcttttcttttggcccttctttacaaaataaatcccttgctttgcagatagcgcagcgcctctggcaacggcagcacgcgggagtaataaaatccctgcaccatatcacagccggtctcacggatcatctcgtgctgagccgccgtttccacgccttcacacagcacccgggtgcccatatcgtgcgccaacgctatcagtcctttcagcatccgcgcgcccttctccgtcatggcattcagcaccacgcttcgctcaatcttcaccaagtcgatctcatggctgtaaagatcggaaagcgccgtgaatccactgcccatatcgtctatcgcgattttgaagcccatttttctgcaggcttctatatttgccgccgcctgttccccgttttggatcagcgaatcctctgtgatctctatgatcaaccggtcgtggtcaaaacggtaacgcccggctatttccccgatcctttccgcaaagtcctcctgagaaatggatacacgggtaaaattgcaggttaggaacaacttgccacagggggtgcccttccaaacctccagcaaggcacacagcctctcaaaaacggcttcatcgtgccgggtgatggcgccggtctgcttcataacaccgatataagtcccggggcgcatcacgcccaattccgggtgttcccagcgggaaagcacctctgccccacagatctcgcccgtgcgattatctactataaattgcagataagccttgatctctccattcgccagtgcccggtcaatatcctgccgcagctgttcgttgcggctattttgcttctgcagttcccgtgtgctaaaggcaaacagttcatctttcttgtgggcgtgctgccagccctgccgggcatagtacagggcgccccttgcatcgcagtccggattctcctccaacggacagatgcccgcccgaaaaagccccgcgtactcctgccgaaaaaccgcaagatatttttttagagaaagagtcatctcccccatccggtcggccgcttcttcccgattgctgcaatggtaaaccaccgcaaaaacgccatccgccatacggcagagaaattccgttccgctgatatgcgatgccagctggtgcgccgcgatctgctggacctcctcttgttcctttgggctcagcagctccttggctttggcatcctcccaggccagataccctacatagtagagatcccgcaccctgtctgccgtcacatccctgaacctgacctcatagcattgtgcattgcccagcccggtcagcgggtcgagcattgcgttctcttgcctcttttttctcttcccatgccgtattataccgagtattagcaatgtagctgccgccgctgccaaagccgccgcccctgccaagcgtgccttcttccacccggcctgcggctcctgccccatggtaaaggagattgccaaggtagttttgtcctcctccgggatagcttccagtgcctctactatgcgctcccgcagctcctctttgatgatcccggtaaaccccacacaaatcgctgtttccctgccgtccgtttcggtggtaagcaccgttcgctgtaccggcagcaccattcggctaaattctccccgccggaatgccgtcaccatttccacctggctgttacgggccatttccagtcggctgtcctcactgccggcattcacataggcaaaggagatcccggtatcctccgccaccattcccagcagctccggcagaattccccggtaacattgctgctcactgtcgtagtactctatggggtacaaatcgggattccccgctatgtatacgcagtccgctgggccagcttcttccacagtagtaagcacctgtgccgcgcaccggggccccaacagcactgtgctcattaccaataccgcagtcatcccccgccgccaaaagccatatccctgctgcttttgtttttccatctgtccgttcaccctctccggtcccatttttctatgcccggcgctgccgcagctgcctcaccgcttttacagccagttccccagccaatggcagcagtgccttggcgcagtcagtcagcagtaccgctacatcgtgcagcgcgccccgcgccttatcggccttttgcagggcggccttttcttccctcaggacctgcacctgctccttcagcgccgctatttcacggtccttttcgcacccctcgcggcgcatcgcctgcacaatggcatccagcttctcctcattctgccgcctttcctgctccatcttggcagtcagttcttcgctcattttggcaatgtattcacatacatcctgcttcttaaaaccccacaaaccggtttttagattgttcagttccatggctttcccctcttttatcaattgtaatttatcgtttttcgcttcatgctgccccattgcagtctgctcttgcggtagccaaaaaatgccgttgcccgcacccatgttaaaacaaaccgcaggcaggtgatctcaaaaaagcacagcagcaccgccttcatcatatcggcaaaggacacccgcaaatccgcggtatacatccgcgcaaagaaggccgtaagggaaagcaccaccccaaacagcacatagatgaggaacagcagcaccataaaccgcacattgatcaatccgctgaaccatgccaatgccatggtagcaacgccaaagatctctataaccggcgaaagcagttcatacaccaaaaagtaaaaataggagatgaagctcaccgcgccaaattgcgggttaaacaggattccgcggtgcttcatcatgctttggaacagccccaggtgccagcgcctgcgctgctttttcaggtcgctcagccgctccggtgcctgtgtccagcatatggcatcggtggcatagcggatacagtaatccatacggttcaccgtgcagtattcgtgcagttttaccaccagttccatatcctctcccagcgtggagacattgtacccccctgccgcaatgacaacatccttcctgaacagtccaaaggcaccggaaataatcagtgagccattgaattggtcgaacagaatgcgggaagccaaaaaggaacggtcatactccaacacctgcatacacgccaacaaattccggggcagacggtatttttttacccgtccatgctccagctccacatcattggcaatgcgcaccagccctcctaccgccaccacatggcggtcctccagcattggctggactatctttttcagggaatccgcctgcagcaccgagtcggcatccatgcagatgaagtatggaaaattggccgcgttgattcccatgttcagcgcatcagccttgccaccgtttttcttgcgaatgacggtaaacggaactttctgtgtccttgtttcataaataaattcttccggctggcatggcacctgccgccgaatgggccggtgcactgcatgcatattaaaggcctcgatcagcgtttgggaggtgtcgtcctcggagccatcatccactactatgacctcataggcctggtattccaggttcagcagcgaatggaccgtagccaccaccgttaccgcctcattccatgccggtacaataatcgaaatgggcatatgatagtcattgggtaggtagttctgcagccgccgctggcggtgctgccggtacaattggatagagcccaccactaccgataaaaacaggaaggtggagtacccgatcagataaacgatgaaaaagatgccgaccacatccaaaaagccatcaatcaactggtacattcctgctccgcctccttttgggtcagatttctgatgtcaaagcgatagcgcagaatctcggtggcatagcggtcatgcccctccattacatcaatgagatccaaataggtcaaccccatccgctccaggcttttggaagcattgaaccggatataccagttgcggctgtacaggttgcgcttcagccgctcaatggtctcatcgccggggtaagcgcacagcgctgtggaggcgatggccgcgtattcccatcgggcatcattgcggcattccgccagttccagcagcgtctcgtaggccggcccgtaagggtagcgccccaggtagcggatgcaggcatagcgcacttcatcatcggtcgctgtgttctgcagcagcgccagtgcaaaggcgcagtgttccccggaatccagccgcaggaagttcatcatcgccgcctgcatctccgggctgaaatccgcgaagcttttctctatacagcgtcccagcgcctcatggtcgccggtaaattccaacaatccgtcggccagcagcttttcgtggaaaaagctctcgccgccatccaatatcttcagagccttcatgatgcagtcgcagtctcctgtggtatatagggcctgcatggcattctcccggcaatagatactggactccctcagcagcgtatacatcgcatccaccacgccggaaaagggccggttctcgatcagacggtactttttgatgatataggggaagtacgccgcctcgattcgatctttccgcccatagcggatcgtcaaatacacaattacccctcccagctgagaaaggtattccgtcgcctgccgcggttcctcccggtacaggtcctccagcatcttatcaaaggcgatcatattcccggtgcgggtcaactgccggctcaagtattttttgtgccgtctctcaacctgctgtcctgtgttgatgcgttctatctgctgcagaatgtgctgccgaaatcgggcgctggcccgcaccgttctgcggtccctgcgctttaacacgatggcggtaatgatgttgaatacgatcatcccgctgcaaataaacaaatagacatacagcagtgtctctatcctcactgctatcgcctccttcccgcatcatccgttccacagctcctgcatcatgtaataagatgccttcagtcgttcatgataggtcacccggtttccccagcctgtaagtgtcaacggcgaaagctcgcaccggctctcctgttctgccgtcattacccccaggtacatttcatctatattgatatgctcaatgccgtaattgccgttgtaatagtcgtccagtatctgcattttagagggatcagcaaaattgagcagctgccacggcagccgcagctctatgcagccctccctggtcataaagtccgccagcgaatcatacgcggcactggccgggtcaccgcagccatatcgcagccgcccggtctcaaaggtcgctccgccgtattttgcaatgatggcctcagtcatcacctcgccctcattaaaaatctccagaatcatatcgatattggtaaagccaggtgcgtgcgggtcgggcaggttatcccgcaggtaggtatcatagccccaaacattctgcgagtaggtactgcgcagcacttcatagggttcctgcaccatcacccggctgttttcccggccatccagcaccaccagaaaatccaccccacggtcgaatttcagcccaaagttctggcaatagctcgtcccagtctttggggtggtatctatgggcagatataaggtttccccctccggattccatccttctttccgcaccatcaggtacagataccgttcatcgtatttcgcggaaagggtcatcccctcattttgcccgatgacatccatctcggtccattcggtcgggtcgccatccagggtacacaccgtttgctcctgccccgggtcaaaggccaacaggccaaaatactgctcattagtctggatatccgaccagtatggggtgcgggtcagattcacagcatgcatggtgttccaggttcgcttaaaccactcatcctgccaggcaaataccacactgcccgcacaacctgctgcttttatgtcctcgtagcaggtagccagcgccatcccctgctcctgctccgtcatatttccctggttgcggccagtatttaggtcccggtgggccatccctcgcccggtggaaacaccaaattctgaaatgactaccggcatggtgtggtgggcaaccagccccgtaagatacgcccggtaggtattcatccgactatcctcatcccggaagatctcgtggtcctcaagccccagtccgctccaatcctctgtccagttcaggtaatcgggatagtaaggatacacatggtaggaggcaaactgtcccgatatcacccgctccgtggtgcagatgtgttccacatccaccgtcgcacatttcatatacagccttttgatctcatcgggatattgaaaggggtctgtggtgggccaattggaaaaggctatgagcttctgcgttttatagcggctgctctcatattccagcaccttatcccccacccgggccaacagcacctcaaaaggagttgccttatccgttgtggtcaggtattttccggtataggcggtatagccctcccggccggcgtaggtgtcatcggtataggctactgtcatgtcatcccattctacccccaggatgtacccgatcacccatggggaaatgtcctttttatagctgccgtagccagcgctttgcacctgttgggccgccaggcggcgctgcccgtgcactacatccagcatggtgcggcaatcctgcagaaaggtctcataaaaatccttatcgtaggcatcccggtgggaattctgcacatagtcatttacccacaccccgtggataagatatagcggttccgggttatccttgttgtattcataaaaagcgttgtagaacgcctcaccttggatggtatagacccgaacggtattggcccccattgcctggatgtacccgaaccaccgccggtaggtctcttcgtctatggcaaactccgttgcccacttgcccggtatcccggagcccatattgaccccccggatctcaaagggctgccagccctccccacagtccaggtagatttccttcccatcggtctttacaaaggtcgtcacgggctcctccggcatcagatcaatataccaccccagccggtagtgtgccgcatccaatgccataaacagcagcaccagcactgaaagggcaataatgaacttcttcactttaatcctcctcagtctgtcacttcgctgtatttcttcactcgggattccgcgctgtactgccgcagtgactcgatattttcatccatccagcgcccgcgctgccggataaaatccttcagctgccgcaccgcctcctgatgggaatgaacattccgttccgccggggccagcagggtatcatcccgcagcgaatcctcccaccgttcaaagtttcgctctatggccggacccaagtattcttccacctcatctatgtagcgcaggaggtacttttcattcagccagctttcacgcagctcccggtaacgccggatgacccgttcggtgaaatattcatccttcaccatcatgttaaaccacagcttgcggtgcacatcaaagtgctgcacctgcatggtggtttgctcctggtaattatcgcaggcgttattaaaatcccacacacacattttcagtcggccgcttacatccctgtaaatataggtggaataggaaccggcatcatagttggtggtaaactcattcaatatcagataatccacaaaggaatctacatccacctgcgcccgatagccatactttctgctgtcatagtcataggaatacaaccccttttcaaaagccgaaaagtccgtcttgatcgcctctttgatctccggggtcagtttcttctctccggggaattccacctccagcttcagctccatttcattgcggtagctgtatgtggtcaggctgttcagccggtcgtactcgcttccatcctgccggtccaatcgcagcagataacctgtgtaggtattgtcgcgggcatccacttccatattcagccgcgcgccatcccgcccactgccaataagctccgtcagcacatagattccctggtactctccattcagcatcagctcacagaatcgtacattgggggcgtattccatgcattctccggctatgttataccacatgtagttgcgcatcaggcttttatccaggtagggtccatgcagcgcccattcgtggtgggcgtccatccccatcaagctctgtgggttgttgtccccgttttcatccaccaactccagtcggtaaccagccttctcaaaatatcgcgaggaatttccccgcacatggatgaccacattgctctccaccgccggcgcatcggttgggtggttgttttcctccgcactgtccatcacccgcatctgcgctgtaatgcggtccgcaccctctgctgtggtggtaaagcccatgtggcggtcttcctcatccaccagccctctcccggggatctccgccccgccggtgtcaataactatcagcggcaggtgggtgcagaattccttttcggcatgtacggcgcagacggcctttggcgtggcttctcggtgctggtggtatcgccggctctccatccgcccggtcagcagcaccgggtagttcagtacacttaccagcaggatacaaatacacgccaccgcgcctataatcctatatttcatgctgctttctgctccatttccttcagcccgaaacctcgtcgttctgcatcacgatgttgacatactccacattgcccagggcatacagacagctgcagagatctttctcctttttctcggccttcttcagcatgctctggctcagctcataaatcagctccaccgtttcctcggtggtgttctccactcgcagaacagccttcccccggaacagctgatacacctgcgccttgatcgccgcagtcttaccccggtcggcccgcagaatcagcagcatccggttgtcgctcttgatgcaccccaggatgaggataatgagaaacaccacggcgctgcccaccgccgccaccaggtaatcccctaccccgcagcagatgcccacaataatggaccaaaagatatacacggtatcacgggaatccttgatggcagtacggaaccgcacaatggaaagcgcgcccaccatacccagggaaagcgcaatattattgccgatgacggtcatcaccgtgccggtcagggccgccaatatcaccaacgaggcattaaatttcttgctgtaaatggtaccccgatgggaaatatagtaggaaataaagatgaagaagcccagcaccgccgcaataccgatattcagtacgatctgttccggcgtcatctcactggggttggtaaaaaggctcaggatcttatccttcatgttgtcaatctccttttcgtcgcggcttacagccgatatcgatacccgttctgccgggccagcatgtatttactcaccgagatctcactttgatccacggtgttgatcatccgccggatataatccagcaggaaaccgttatacttcacttccatcaccaccgcgccggggtccagcaccggggccatattcagtcgctcatcaaagaggtcaaagctgctctcggtggcaacgatacggctgtcaaaggtcacccgtatcttgttttcctttgcgatgaaggccttacggtcatattccactatggcctttggccgatagcagcggctttgcattagggcatagcactccgccgcaaaggcttctccgctttgcagtagcggagtatagtccccggtgatcagccgctgggcaacctcccttgtcacccgcagcgagcgcttgagctggcttgccccctgtttctgcttcatttccagcatagcatagccggcagccgggtcatagcagcgcagccgtatcttgcggcgggtctctattccggccagcttttcatggtagtcctcatcgtacaccgtatcaaagtacagcgaacgaatccggtatccatgcactccgttgtgggggtcctcccgcatcacctgccccagcaggtggctcctttgcagggcctccgccataccgataagatacttcttctcctcccggaacacccggttcatcccatgtcacttcctcccaaaataaaaaactgaccgcaacaaaagtctctttgtgcggtcagtccatcataccggcatttaccgggttagacactaaactttgcgtccccgtctttcggcgggtttgccgtattcatttttgctcagaattccgccgcgttctccactatctccgcacggtcattcacctttttgttccggtacatcatggcatctgccttttctatggtggcatacagagcctcgatgccgccctcgtacagggcatatcctagcgaaaccatcggcatttgggggtcctgctcccgcagctggcccagcgctgcctcgaacatcccgttcagcttttccatctggtgcaggttcttggtcagaatcaagctaaactcatcgccgccatagcggtagcagtcaccatgccgcccatacaccgttcgtattacctccgctatctgccgcaggtaatagtcccctgccgcgtggccactggtgtcgtttatctgcttaaagtcatcgacatccatattgataatgaccgccggcggtttaatgcgctccaggtccttctcatactgggtgcggttcaacagcatggtcagtccgtccaaacgggaaaaccttctgcaccggtgattatacagcagcgcatttcctactgcgacgcacagatagtccacccgcagatcgggaaatatcatctggatataaatacccatcgaaaggaacagcataatcgccagcagtgcggcttccggccgcatttggtatttcatctcgtccatcatcacgcatataaagcagtacaggatagaaacaataaataccgccacatgcacccagtacagcctgcctctgtggtaaacattcatttcatcaatatagaagacccatccgtactggttgctcacgatcatgaacagtgcattcactacaatggctccaatagcggccgcaggctttctcaccttgccgtatgtgtgcgctgccatcacacacatcaccggcgccatgcagaattccaccgttttagcgaaccagtgcggcccgatcagcgcaggctctgcaccgttcgtctttaccccgatccattctcccatctgggccaatcctatgatcacacataccgttatgaaccgtatggtcgctgttttatccgccagccggtcggtatatacatccactatgttcaccaccagcagcgccattgtgatcactacgatcgcagtatacagatccacacttgctccacctcttgctcattctttgagaaatcaacaatgttcaaatttcatctttttaccacaaaagcccggctttcatcgattctttgctccatacattttgtcgtttttgcacaaaccattatatatattagttaatcaataacaattttacaatataatgtccttttcgtcaatcctttacaacttgctcttcccctgcatttcgcaccgtctcagcaccttttcgcgccagtctgttgtttttctgccgccctcctactttcagcgcagatatgcatgttctaggagctccacctttgcttgacggggacacatacggttttgacgggcatgaatgccgcgcatgtccttgtaaaacaagcgaaagttctgctctcctttttcctgccagcttgtgcagagtacaggccgcctttctttctcctgcttaaactttgcaaaaggagccggacagcaccttctcggttctgtccggctccctcgggtcatttcagtcggccctccccgcccattagggcggtcatctcctctatgcgctccagcgggaaaggcggctcacacaggggctttagggcaatgctcatcagcttcatgggattgtcatcggcagccaccctgttggagctcagtgctccgcacctacggcagcggtggatgatggcccattcgcccttaccacgcacccacaccgcaatcggctccatgatgccgccgcagtcggcttcccggtcccccggctcgatatccacatgcaggctggaaagacagttggggcagtggttgcggtggtcggtcccggccgcatccggtgttaccaaccgcccgcacactttacaggtaaagctgtcattgcaggggtggtctttatagtagcctttttcaaaggtcttgcgtttattctcgcggttcatgttgcctcccgttgagtcattttattctttggccgcgcggcacagcgcttcgatatccccatttcggatcgcggcaatattctggcggatcttttcttcctcccagtcccaccagcggagctcctccagccgggcaatagtttccacatcaaaccggcggcggatgggcttagccggcactccagccgcaatggtatagggcggaatatccctggtcaccacagcacgggcacctataatagccccatccccgatcgtcacaccggaaaggatcaccgcctcatagccgatccacacatcgttgccgatggtgatgctgccatggttatcccacgcctccgcaatggaagcgcagtcggtcggcagtccccattcctcaaagaagatggggaacggataggtagaaaggctgcccagcgcatggtttgccgcgttaaaaatgaatttagcgccgcaagcgatggaacaaaacttgccgatggacagggtatcgccattgcactcggggtaatggtacagcacgcagttgcgctcaaaatccctcgggtcattcacatagtcatcgtaggtggtgtattcccccacctgaatggtcgggtctttgacaacatttttcaggtaaacggtgctgtgcccctgggaacggggatatatcttccaattaggtatcatgttatttcctccggaatggtcagtttttattttctgtattccactccggtcactacaatgcaacgcctcacagcaaaccacctctatctctttttcgtcttgctttattccgttatttctatccggttaccttcggggtcaaggatacaactctcgtaataaccgtctccggtcaccctggggccgcttatcaccggatagccgtccatgcgcagccgctctgtccattcatccaccgcctgccggctgcccacgctgaacgccagatggctgtatcctgtcctgcgttccgcctttggggcatccaccatctccggcgctgtcatcagttccagccgtgccccgcccgcaaaccgcaggaaataggattgaaaccccgttttagggttgtggtagcgttctccgctttgcccgccaaaataacggcagtagaattctcttgccgcctccaggtcattcacatacagggcaatatgctctatcctcatactgtcaccttatctgcagctggatgaacccaatgacagcaaggtgcagcgggtagtagatgtaaaacagccacttcatcaccttgttcaccgccgggtttttaccgcgcttgccattatacagcgccagcagcgggatagcaagcaccacacatagctggagcaatccgtacagcttatccagcgcgaagaagtacaccactgcatagattgccacataaaaaagactccacgcgatctgtttcttcggttcgccccggttggagccaatggaaagcacgcacagggcggcaatacagctccaatcgctgggcaatgtaatcaggcaaatcagcaatacacccgcaacctttacccccatgctgcgcttttcgtcctcacacagccacagcatcagcagtccgcccagcagcgaccacaccacactggtctggttcagaacatccccatagtagaacgggataaaggaatgccagtccgcataactattggaggccaacatatacgcaaaatgcgaaaccaccgctaacatgaacagtcgcagcgcgtacttcttccgattacgggtatagtggaagccctccgcaatgaaaaagcacatgactgggcaggtgattcgcccaataatatgcatcacaataggtaccgccccggcggcataccccgggaacagcagccacgctatgtggtccaccgtcattgccactatcgctatcagcttcagctggttggcatccagccactgatatggtttcagctctgtcattcgctctcctcttttcctccggcgggcgccgcttcattcgggctgctgcggcgcaccctgcggcagccctcgacgctttggtgcggccgcctgcctttcgcagaatccgacccttgcggtttccattatacggctttttcaaattccctgtcaagtcaaagcggagcccccggccgctttccgccggaggctccctattttcactctcttggataaactgatttatcttggcagacggcggtacagccccgtcacatggtgcagccggtcggccagctccggggtaatgctatccggcgcggcgcgccacttccagttgcatcccagcgtggagggaatattcatccgcgcctcgctgcccaggcccagcaggtcctgcatcgttaggatgacagtatcaccagggctttgcagcgccccgcacatcatgccccagttggggccctccgcttcggtcaggcgcaggtactcccacgcaaaccgcacatcctccggggatgccgtatgcatccatcccatgatggtatcattatcgtgggtgccggtgtataccacacagtgccggggataattgtgcggcagatagacactgtcctcccggctatcaaaggcaaactgcagcaccttcatgccggggaaaccgcattcctcccgcaggcgatgaaccccctcggtcaaaaagcccaggtcctccgcgatgatgggcaagtcacccagcgcggcccgcaccgcatggaacagttcaatgcccgggccctgccgccacacaccgtcacgggctgttgcggccccgccgggaatggcataataaccctcaaatccacggaaatggtcaatacgaataatatcatacagcgccgcgctggccctaaagcggtcgatccaccagcggtagccatccgctttcatggcgtcccagcggtacagcgggttgccccacagctgcccatcggccgaaaatccatcgggcgggcagcctgccacctcaatcggctcgtaattttcatccagcaggaattgctccggagcactccacacatcggcagaatcccgcggtacatagatgggaatatccccaatgatacgaatcccgcgctcattggcatagcccttcagggcccgccactgccgggtaaacaggtattgcagcatcatctggaagccgatctctccggcatattgctcccgcgccgccgcaatggcacccggctcccgggttttcagcggctgttcccactcgttccaaggacgcccgccatgggcatccttcagcgccataaacagtgcatagtccggcagccagtgcccgttttcctcgcagaagcgccggtagtcctccggtgggttctgcgcaaagcgccggtaggcgtggtgcagcacctcatagcgcagctggtacagctgtccgtagtccaccgaaagctcactttcgcaccacggcagccgttcatattcatcgcgctccagcagcccatcccgctccagctggggcaggtctataaaatacgggttccccgccaccgagctgaacgactggtacggtgagtcaccatagctggtcggcccaatgggcaaaatctgccaccaggtctgcccagcccgctgcagaaaatctacaaaacggtaggcgttatctcccattgtgccaatgccgtaaggccccggcagggaggatatgtgcatcagtactccactgcttctcatagcttttgctctcttttctatcacatcttggcttgtgctcctgggcccagccccacactctcgccgcttatcacggtaaagggcaccgtcacccgccgggccggcgcaccgttctctatggcatccagcagcgtgccagtcgcttcccgcgccagccgctccaccgattgcccaatggtcgccagccgcggcgtcaggtattctcccaacgccagtccatcaaaaccgatgatggaaagatccttgcccaccgtgcgtccggcatcctgcgcagcccgcatggcgcctattgccaccacatccgctatggcataggcagcggtgatctccgggtgctcctccaatacatggtgcatagcctggtagccctcttcatagcagaagcgcgcctcgccatactccaccagattttcggccggcagtccgctttggacaaaggccgcccgtcccccggcaaagcgctggccggaaacatcgctgaagctgggccgcccgccaataatggcaatgtgccggtgtccatactccagcagcactcgcaccgcttgcaccgaggcctcaaagtcatcggtcgtcacactggaaaggttcgggtagtccagcccttcggccggggaggtcaccagcaccgccggcagcgtaatgcgcccaaagctccgcttaaagttatcagcattgccgcccaggaataggatcccctgcggctttttctcggcgcacagcgtgatcgcccgctgcacctcgtcggtatcctcgtcaaaataatccaccagcagggtatacggggtattgttcaccaggccctgcagctgctccaccagtgcggcaaaaagctcatttcttacgccctttaccagcaccagcaggcttcggtttaccgattgtttcagattcttggcgttggcgttttgggtatatccattcttcgccaccaccgctaggatgcgttcccgcgccttttcgctgacatccggatggttgttcagcacgcgggaaacggtccctacggcatagccgctctctctcgctatatcttttatcgtcacagcagtatcagccctttacggcaccggccgccacacccttgatgatgtgcttctggcaggtgaggtagaagatgatgaccggaataatggaaagcatgatcagcgccatcaccgcgcccaggtccaccgaaccgtagctgccctgcaggaactgaatgtgaatgggaatggtcatatactgcttgcggtccagcaccagatagggcagcaggtagtcgttccacacccacataatctccagcacaccgaccgagatcatggtaggcttgagcatgggcagcaccacattaaagtaggtccggatgggcccgcagccgtcaatggccgcggcctcctctatctccagtggaatgctcttgataaatccgctgaacataaagactgccagccctgcgccgaagcccagatagataatgggaatggtgtagggggtattgagcttcaaggtatcggcagtgcgtgccagcgtaaacataaccatctggaacggcacaaccatcgaaaaaacgcagaggtaataaaccagcttggaaaagccgctgcccacgcgggcgatgtaccacgccgccatgctggtgcacagcaggatcagcgctgcggaaacaatggtgatcagcagcgaatagcctgcgctcttcagaaaaggatagttgccgaaggtaaggcccttgatatagttgtccagtgcgacaaaggtgccctcacgcgggaacgcaaaggtctccagattgatggaggcgttgctcttaaaggagttcatcgccaccaggaatatcgggatcagatagataaaggaaagaatcgaaaagatcaccgtcaatgcgtcgtggcggcggcgctcgctcttaaagccgcctttggcgctggttttttccgttgtcttagcagacattattgctgcacctccttctctttggtggaacgcagctgcaggatactcaaaacagccaccagcacaaagaagatgacggcttttgcctgtcccacgccgcggctgcgtgcgctggcgtagaaggagtttacaatattcagcgccagcatttcggtggtctttatcacctcgccgccctgctggataaagggtctgccggcggtcagcgccaggttctggtcgtacagcttaaaggaattggtcagggtcaggaaggtgcagatggtaatggagggcatcacattgggaatggtgatcttccacagcgtctgccagccgttggcgccgtcaatccgggccgcctccagcatatcctccggcacgctttgcagccctgccacataaatgatcatcatgtaaccgatctgctgccagcacatcaatatgatcaagccccagaagccgtatttggactccaataccacgctggtgctgtatttgatgagaataccgttgaagatcatgctccagatgtagcccagcacaataccgccgatgaggttcggcataaagaagacggtacggaacaggttggatcccttaattcctctcgtcagcgcataggcaatggcaaaggcgatgacattgatgagcaccagcgaaaccacggcaaacagcgccgtgtaccagaaggcatgcccgaagctcttatcctgaaatgcggcgatgtagtttttgatgcccgcccatgtccagttcttggtggtcttaaaatcgcagaaggaaaggaagaatcccttgcagaacggatacagaaagccgatgcagaatgccgcgaaggtcggcagcaggaacagccagaagcacttctggatcggtcgccggatcagcggtgaattaagcgccgcacgatcacggttcttttttgcctttttcataatgtccctcacactcctttggtggttcgtccggtttttcggcaaagccggcagctcgcgcccctgtccttttcgtcgtacagtcgggggcgtcaggtgcgggttttccctatcttttttgcaaagcgggggcgagcgcagtgctcgcccccgttttatcacaataattcagttttccgcaggcgcttcatcaaaagccttttacggaaatcccgttgtcagcggaagctcctgagatcaggagttctccttggcatactgggcagcccagccgtcaacaaaggcagtcttaacaacagaccagtcagcgttgccggaggtgtactgggtcagagcgtcaacaacaccggcacgccactcatccacagcgggagtgtagttgaatgcccaagtcacaacatagttgccgttcgcggtgtagtcgttcgcctgagcgaagaatacattctcgggggtcttggcagacttgaaggggatcgggccaaactccttcgccatcatggtggtgccttcctcagaggtaacgacccacttcatgaattcgagggtagccttgatgtcttcctcggaagcgtacttgttcacagcccagcagttctcggtgccgcagcacagaccggctttttcttcgccctctacgccgcagtaaatcgggatcatcgccagatcatcggggttcatgttgaacttggaggtcaggttggagtactcccagctgccgttctgatagaatacagccttgccctcgccgagctcagcctcagcctggtcgccggtagcggaaacaagagcagcgccggtggtggcggagtcagtggtgtacagatcccagaggttcttgtagttatcgaggtaagcgccggtgatggtggcgggctgagaggtcacgccgttgtcacggaactcatagaacaggggcatattggccagatggccggagaaacgccagctggaggaaccgtccagaccggcagaggtgaaggcatcgaagcccagctcggcagcgcggctgtggatatcgtcggcaaccttcttcagggactcaaagttggtgatgtcggtcagctcgtagccagcctgcttcagcagagccttgtttacgatgatgccgaatgcctcatagcagtaaccgatggaaacggtctcgcccgcttcgttcttcaggttaaaggcgtcggtggtcatttccttcatgatgtcggtgttggtcaggtcgtagcagtactcgccccaggtccttactgcgccggcgttgcctacctggaacatggtgggagcagcgtccttatccatctcggcggtcagcacctggtcataagtaccggaagccgcagtcagaacggttacgggaacaccggtcttctcggtgtacagcttcgccagatcctgccaagccttgtcagcctcgggcttgaagttgagataataaacagaaccggtcttggtgtcgggggtgggtgcaggcttgtcgccgcaggcggtaaacagagtaatcgccataacaacagccaacagaattgctaatgtctttttcatggtttctcctcctataagttgttgcgttttctttttgagctggaatcgtttccagccctcgcaatgatattatacagcctgtcaccggtcatttcaatcaaaatctgtcgccctttcacaaattcagcaaatatgctataaaaccttttatgaaaattgagcatctttccaatcgttggccccagccgcggtctattttgcgcctctttgggcggattattctccctttccgggcaaaatagcagttgacatcacgcgccgccctttttataatagtggcgtaaaatataccacggaggtggagttttatgaagcagcgctttgatgtgaccggcatgagctgtaccgcctgcagctcccatgtggagcgggcggtctcggcgctggcgggggtctcttccgtcactgttgatttgatgcagaaccgcatgttggtagaatatgacgatagcaagctctccgaagcagagatctgccgggccgtggccgcggccggctacggcgcccgtccagcgggcgccgcgggcggctctgccgcccagccccctgcgggggccgccggccgcgagcgcacccgcctgtggatctgtgtgggccttctgctggtcctcctatatatctccatgggccacatgatgggcctgccgctgccctccttcctttccggccatcacaatgccctgtggttcggtctggcgcagctggcgctcaccctggccatcgccgttttgcagttccgttatttccgccggggcttcgcctctctgttccgcggtgcccccaccatggataccctcgtggccgtcggctcctccgccgccattctgtatggcgtttatgccatcatccgcattgcccaggggctggccgccggggatatggaattggtcgcccagtaccacatggatctctactttgaatccgccggcaccatactcaccctcgtcagtgtgggcaaatactgggaagcccgcagtaaaagccacactgccgatgccctgcaaaagctgatggccctagcccccgccaccgcccacctgctgcgggatggcaaggaagtcgaagtcccgctggaggaagtccggcagggcgatctgctcatcgtccgcgcgggtgaggccattccggtggatggcaccgtgaccgaaggacaagccgccatcgatgaatctgccatcaccggtgaaagcatgccggtcgacaaatccatcggcgatcccgtcaccggcgccaccctgtgccgcagcggttatttcaccatgcaggccacccatgtaggggaagaaaccaccctctcccagatcattcatctggtggaggatgccgccgctaccaaagcccccatccagcgcatcgccgataaagttgccgccgtctttgtgccggtagtcatcggcatcgccgtgctggccatggtcatttggctgctcgtcggccaaacgcccgcctttgctctttccatcggcattgcggtgctggtcatcagctgtccctgcgccttggggttggccacccccactgctattatggtgggtaccggccgcggtgccgaatacggcatcctggtgaaaagcgccgaagcactggagcgcgcccacagtattaccaccgtcgtgctggataaaaccggcaccatcaccaccggccagcccgccgtcaccgatgtagtggagctggatgcccgcctgctgccggtggcacacgcgctggaagccgccagtgcccacccgttagctgccgccgtcaccgcctactgtgcagaaaagaatatctccctctcccccgtcaccgatttcaccgcgccggagggacagggccttaccgcaaaattgaacggcgaaacggtctggggcggcaatgcccgcctggccgccgccatgggctgcgatatctccgctctttccaccgcggcggaggagcttgccgccaggggacgcaccccgctgtatttcggcgttggcgccacccccctggggctcatcgccgtcgccgatcctccccgggaaaccagtgccgctgccattgccgccctgcggcagatgggtctttcggtactgctgctcaccggtgatcaccgccgtacagccgaagccattgccaaggaggtcggcattcccagggtcatcccggaggtgctgccccagcagaaggaagcggtcatccgctccctgcagcaaaagggcgaggtggtcgccatggtcggcgatggcatcaatgacgcccccgcactggtccgggccgatatcggcatcgccatcggtgccggcaccgatatcgccatcgattctgccgatattgtcctcatgcacagtgatcccgccgatattcccgccgccctgcagctttcccgcagcgtcctgcgcaatatcaagcaaaatcttttctgggctttcctttataatagcatcggcatccccattgccgccggggtattctattccctgctgggctggaagctcagccccatgctggcctccgccgccatgagcctttcctcggtctgcgtcgtcagcaatgccctgcggctgcgtggctggaaaccgaagctccccgccgcagatgccctccctcccgtcaccgaggtggaatgcaccctcctcccgcagggagctgctcccgccgccaaaccccagggaaccgctgctcccgccgcgtcccagtccctcgtcctccatattgaaggcatgatgtgcgatcactgtgtcggccgggtcaaatccgctttggaatccctccccggtgtcaccgccgaggtaagcctggccaaaaacaccgccgccctcaccatgacggtgccccactctcccgaagagctgaccgccgctgtggaagccgccggctacaaggtggtgcagccgcaggctcctgccgccccgcagaccgtcaccctccacattgacggcatgatgtgcgatcactgtgtcgggcgggtcaaggccgcgctggaggcgctgccgggtgtcaccgccgaggtaagcctggccaaaaacaccgctgccctcaccatgacggtaccccactcccccaaagagctgaccgccgctgtggaagccgccggctacaaggtgacaaggatagaataatatgttataatagcagggtatccgcagggatgccctgctattttatccttgccgaaaggagtattccgatgggctttcgttctatggtcagttccaccctcagcagcattgccgctattaccatcggcggggtgcttaccgttatcggcatcgtcagggagatccgccccctggccgttgccggcatcgcgctggccgctctaggcgtcatcttctttatcgccgcctttatacgggcttggcgttccctgaaacagggagaaaaagagaaagggggtcccgagcgatgagtttattccgtggcagcggcaggctggaacaaaagctggcccaaaataatgaccccatgaaacagaaaaagctgtgggtcaaatccttctactgtgcggcggtgctggccgccttggggcttttcttcctactggccatgggcagccagtttaccgtctttgcctgtgtcctgttgggctgcgcggccttcgtttttgtcgatggcctggtgaccaaaaaccgcaaataatcccccttagagaagtgcttttgcgcttctcttttttgaaaataacaagaacaaatgtttcacgtgaaacatttttgtcattcgctttttatggggaagaaaaaattctccgccggtgctatactaagagcggatttttaggggaggtgcattatggatctgatccgtattggttcatttttggcggagctgcgccatgaaaaaggcttgacccagcaggcgctgggcgagcgcctcggcgtcaccaataaaaccatttcccgttgggagaccggctgctacctgccggatgtggagatgctgtcgctgctctcccgagaattcggcgtcagcatcaacgagctggttgccggcgaacggcttgtcgccgaggatttcaaaaaagccgccgatgaaaaccttgtcactgcactggaccacagcacctttaccttaaaggaaaagcaggcgttctttaagaaaaagtggcggcgggagcatctttccacctttattttctgtgcaattgcgtggctcgtcctgatggtcattttaagaatacgacatgtcgaaccggagctttgcggcacggtaggcggcatgcttgccgttctgtattatgcggttctcaataaccgcatgatggcgtatgtcgaacggcagctctatcccctgccgcacgaagcaccgtcacgcagaagcggcgccccgtaacgggacgccgcttcttttttgctcctcttagaattgacggttggggtcttccggcatcacaagcgccgcaatgatataccccagcacgccgctgccgcccgccaggcaaaaaatgatccaggccaaacggaccagggtggggtcaatgtcaaaatactcggcgatgccgccgcagacaccgcagagctttttatcgctttcggatttatgcagtcttttcccgttatatgccatcgtgtttcctccttttggggcactttagtccccgatataaatgtgcatggcttccttgacctcttttacggtctcgttgccaattttattggctttctcgctgccggtcaggataatatcccgcacctcgtcgcggtgggcttcgtagtaggcacgcttctcccggaacggctccagcaggtcattaagggatgccgccagtgcttttttgcaggccacgcagccaatggcgcccttcttgcagctctcacagatattctcatactcaccggcattaaagaccttgtggtacttgctgacgacacagatatctgggtggccggggtcgtctttcttgatccggctggcatcggtcacggcgctcatcacctttttgcgtacttcctctgcggggtcgctcaggtagatggcgttgcccaggctcttgcccatcttggcgttgccgtccaggcccatcaggcgggggcaatcggaaagcatcatgtccggctccaccagcgtttcgccgtacagctcattaaagcggcgaacgatcttccgggtcatttccatgtggggcttctggtcctcgcccaccggcaccaggttcgccttgcagaaggtgatatccgccgactggctgacgggataacccaaaaagccgtaggtcatatcgttatagccataattggccgcctcggtcttaatggtgggattgtgccgcaggctgtttaccgaaaccagcatggaataaaaaaccgtcagctccccgatggaggggatgcggctctgctgcaccagcgtgatcttattggggtccagaccaacggacaggttatccatcgccacctcgtagatgctgtgctccagcagctcagggtgctcaaagtgggtggtcaaggcctggatatcagccagcagaataaagctctcgtactcatcctgcagtcttacgcggttctgcaggctgcccacatagtggcccaggtgcagcttgccggtggtacggtcgccggtcaggattctcttcttttcggacatggtggttcttcccctctcattttcaagtggttctgccctttatcatagcagggtacggcaccttttgcaatgtatttttgcgtcccactttcccctcatttgtacgcgggccaaaaatccgggtctcggattgggccggttcctgcaatgtgccttcgcgctccacctgccttttgcagcgccaagataccgcgcctattttatagtgagaaaaaggtctatttccagactgggcaaatcgctgcaaggtacaggcttgggccgcaggccaagccgccctccgggcggctttcgcgggccccaggaaatatccacacctcacagacccctgcaaacccatccagcacaaggtatccgcagcacgcaaaagcccctccccttaccggggaggagcttctgattacgggtttagccccatacattgggctgctggtggttgggattataggtgacggaaacagggcccatctcctcgcccgggcgcagcaggcgcgccattaccacaaagcgctggttatcggtattgccgtagtaacgggtgcaggtggaaagggtcagcagcttatcgctggagttgacatccacaccaaaattgtggcgggagcggctctgcgcgccgctgatcacaccgtcaatattaccctcggcattgatataccaatcgctgccctcggtgtagaagcaggcaaagataacaaacgccatttcctcactgggggtggaatagtagatgtagggatactgctccgcccagctggtgtagtggtagctcagcagcgattcaaacatctgctggccggcatagtaggtggaaggggcggcgttccagcggcagttcttccagttgtgcccatagatgacattgttgctggaaaggctgtcgccgccgccaaagcgagtcgcggtctgggtccacagcacaccgtagtagctctggccgcggtccaggccacggtgcaggtagtagtggtcctcgctggcattctgcagcaccgggtaattgatgttggtgccggggatcttaagccaggccttcacatcgctgttcagtgactggtagtagctcaggttggaagcaccggtattgccggtataaacgctggccttaaagttcccgccggttttggtggcggcaagagcccggccaccgctgctcagttttcctccgttgccgggcagctcggtgctgtcgctggtggaggtgttggtggtctgggcggccttggccgcggccgccttggcggcttcctcagcggcttttttcagggcggcttcagcctcttcgctggcttcagtcacataggcagctaggttcgcttccgcggcagtacggctttcccgcagggcctgccgggcgctttcctgctgcgcctgctgcagatcggcggccgtagccagcgcatccgcaagggcggtattggcccgggcggtcactacgccgtttacccccacaccgatgaccgcgcacatcgcggctgcggctactgcggcagtcactcttctgcggcgatatttcttggcccgctgggctttgttttctttggtggtttctgccataatgttctccttcttctcgggtttgttgccggttcccggcaggtatgccggtttatggagccagtatagcatattttttccgctttgcaaagggctttcctgtattggctgcatttccctgcactgggtttccgcaaggttccagttcgggccgcagaccgctccggctgcgccggagccagcgggctccgcccgctgaaatcgccctccgggcgatttggcctgcggcccgcccccgggcgtaccccgcggcaaaaactaaagcacccatccttgggggacaggtgctttgattttgctttcttcggtacctcagtattccttcatcggctcgccatctagcccggccgcgatcttcttttccgtatcctccagcatctcctgccgcagcgccgtcaagtaaggggaaaaggccgccttatcccagccgtaggtgcggttcagttcgtactcatccggaatccaagtggaaagcggcgactcattgtgctggatcaccgcctcaaaattatcaatggccttgtaaattttcgcttcggtggtctcccgcgccgccatctcctcatacagggcacgcatctccgcagcatagggctgcggcaaagatgctacccagttatacagcagttttt

SEQ ID NO: 4547 - DNA, 32759 bp, Unknown
  16S sequences of unknown bacteria
cttcgcccgtttccgccactggcggcggcgaagctccgtccctctcgcgctctcctcggggtttttgacagtctgagggactgtgaaagaacaaccaaagtttcttcacagccccatttcacagcgcgaagagcgtgatctcggtggggtagatgggcgagccatcaaaacgcagatagaatttgtagtccggggacatttcgtggatcatgcgcggaatcttccacaaatcctcgttgttatggtacaccgaaaagagcagtttgggatgctcccttacgatgtggccccgcgcgccgagcagcgccttctgttcatagccctcgatatccgccttgatgagcgtgactggctcgcggatatccgcgtccaatgtggtgacggcgaccgcctcgccgccctgtgcgtccagcgcgttgccggacgcggaagtctggtgatcccgcacgtgcagcacgccctccgcgtctcccacgcccttgaggcggcaatcgatatcgcggtaaggcgcgagcgttcggacgaggatttcaaacgtgctgggcgtgatttcatagcaatacatccttttgtagccatcctctccataattgcgcaggtaagacagcgcggtatcgcccgtatacgcgcccaggtccacgaccacttcctcgctggtgcaggaaacgaggtccagatcaaaatagctttcaaacagggtttcccgcgcctgcgctggggtggcgaagtcatagcaataccagttgttcaaaatggcgtagagcgtctttttcgagcgataatcgtccaagcgctcatacacccagataaaatcttccatatgctcggtgagagcctgctgcttccattcgatctcttcaaaaactccgttggccggatcgagcctgccccaatacaaaaactggttgaagaaatctgcacaactcttttgtgtctccgcaggtacggcttcgaagctcctgcgcatccgatgatacagctctttctcgcccaggctttgaatttcctgcgccatctgataaaagctccggtcgattcccgtcatagcatcacgctcccgccccattctatgcgggcatggaaggtggaaattcccttgcgcataaaaagcggcgcgttccgcgaagaaacgcgccgctttggggattccagcgaaatatttttacttcgtcttatagcttccgcagcagctttcatccgaaggattgccgctgccacagccgttgcacggctccacctggatggaattcagcgagcaaaagtcctggccctggcagtgaaagcggcaactttccacgcggcagcgaatgtccgtattgggtttcataacgttcagcctcccgagcaaaatttgcgtttccgcagaacatagcgttcctgcccgggacgctaaatatgcacgctgagcgcgccaatgacaaaaaacaccagcgcggcggccatcagcgccgcctcgccccagcgcacgcgcctgtggcggccagatagcacaaaatacgccagcgcgcaagggatcagatccgcggtgtaccgcaggccaaattgaaacccgccaaacgacttgtgcagcatcagcaaaaacagctgcgccgccagggctaccagcgccgccacctgcgcgggacggatccggcggcggacgatatccaccgcgacccacactgccaacaaaaggaaaatggggttggccaaaaataggttgaagccaaattgtacaaattgcccattttccagcggcatgccggtgaacacgagctttgcgttgtcccaaaaatacgccagggaaaactggccgtgctccgagcgcgtgaactccggtaggtaattgtggccgaactcgaaaaaggagccgaaccgcgccagattgtacagcccatagcacagcccgatgcacagccccgcgcacacgccggggatccactttttccagggcacccggcgatgccacagcagcgccgccacggccaggcccgccaccgcgttgaagggacggcaccccacagccagcgcatacaggatcaggctaggtgtgggccttttccgctcggcgagcaacacggccagcaccgtacacaaaaatgccagcaattgcgcctgataccacaccgcgccgatcaacatgagcggtagcagggacgacgcgaacacaaacgccgaggcccagaacagcgccacagcgatgtgccccttgcgcgaagcccaccagtatataccggaaaacgcgcccagtgcgtatagctttacgagtaggccatcgggcgtgtttgcctcgcagaaaaacgacagcaaaagcagggggagcgaaggcacgggcggaaagctcacgtaatagcgcccctcaaaaatcgccagttccaggtgcggataatcctgcgagagccaggtgcgcccctcacgccaggagagcgcctgcaaagtgtaggtattgtaagctgaagtgccgaacgggtcatagccgcacagacggctcagcagcgccagcacagccatccaggcgagcagcgcggcggcaagcgccgccgcgcgccgcgcatttagcgaatgaaatttgtccatgcccgttcttcctgaatgggctctggcacgcccgcggcgcgccccgccgcgatgcactggagcagccaggccatgttgtatcccaacacgcgcatggtctgcatgccttcgagatccttgcgcacttcctcgggcgaattgccatgcaccatgggccaatattgtgaggacaccacgggcatctgcgaaatggtgggatacttcatcaattgctccagcgccgccgtggagcccgcgcgccggcaagaagcgacaatgcctgccggcttgccgcggaacgccgcgctattggcataaaacgcccggtcgagcagagaagtgatcgagccggaagccgccgcgtaatgcaccggcgtgccaaacacaaaaccgtccgcttcctgggcgcgctcgatcaaatcattcacgcggtcggaaaacacgcatttgccgcccgtctgccggcaacgcccgcagccgatgcagccccggatgggctgcgcgcctacctggaacagttcccattccacgccggaacgctccagggcgcccgccacttccatcagcgcggtataggtgcagcccgcctctcgggggctgccattcacaagcaaaactttcatattccgtcctttcctcagtccgtctgccggatcaattccgcctccatcgcgttttggagctgatccaccagctcgcttgcgccgccgcccaccggttcaccgtccaaccggttggcaacgcagcatagcgcgctcgccgcggtgaacaggatttcgtccgcattgcgcaattcatcgagcgtatagggccgttcctccactggaatgcctagctcgcgcgccttttgcaaaagcagcttgcgcgtgatccccgccaggatcaaattgtccagcggcgcggtgatcagcgcgccatttttgaggatatgcacgttcgaatgcgcgcattcggtcacgcggccattgcggtgcaacacgcactcctttgcgcccgcctccgcggcgcgctgggaatagatcaccgcgggcagcaggttgatcgttttgatgtcgcagtggagaaagcgcgtatcttcctgcgtgatcaatgcatagcgcgtgcgcagcggcgcgaaggccttgggccgcacggtgatccacaggttgctcttggcgtctttggggaacggatggttgcgcggcgctgtgccgcgtgaaagttgccaatacacctgcgtatcgggcgaatccacccggcgggcgcaatcgcgcagcagctccatcagttctggctttttcagttcgcattccatgcccacgcgcgccgcgctgcggtaaaaccgatccacatgatcctccagcaggaagggcacatggttgcgcgtgttcgtagcgtcgtaaatcccgtcgccaaaatagcaggcgcgatcatccatgggcaccataatgtccgcgatctcgccgatctttccattgtaatatcccagtgtctccattctgaacacctccattccactgtatgataccgcaatttggaaaaaaagtaaatcccccccagggaaatttggattgcaaaaaccgtgatttttctgtatactatttttatcacaaaaaaggaggattttccatgaaagcgtttttgcaatccgccgcgcacgtcacgcccagcgcgcggcaaatggcctggttcgatacggaattttatgccttcctccactttggcgtgaacaccttcactgggcgcgagtggggcgacggtacggaatcgcccgccattttcaatccggagcgcctggattgcgaccagtgggccgaggctgtgaaggccgcgggcgcgcgcggcatggtgatcacggccaagcaccacgatggattctgcttatggccttccaaatatacggaacacagcgtgaaaaatagcccctggcgggacggcaagggcgatgtggtgcgcgaagtggcggaagcgtgccgccgcgcgggcctgaaatttggcttttatctttcgccctgggatcgcaactgcgcgctttacggcaccccggaatacaacgattattataaggcgcagctcaccgagttgctcaccgaatatggcgatgtgttcatagtgtggttcgatggcgcgtgcggcgaggggccgaacggcaaaaagcaggaatacgattttcccggctatatcgagctcgtgcgcaaataccaacccaatgccgtgatcttcaacgatggcgggccggacgtgcgctggattggcaacgaaagcggcacggcgcgctttgccgagtgggccgtcatgccccgcgaactgacccatatggctgaggtgcagaccggccccgcgcccctgcacggctatattccgctcgatggcatctacaacaccatgcccgatctgggcgcgctgtcgaacatcatgctctcgggcggcctgtgcttctgcccggcggaggtggatatgtccatccgccccggctggttctatcatccagaagaagagccgcattcgctcgagcggctccagcgcacgtacatcaccagcgtgggcggcaacgcttgtttccatctgaacatcccgcccacgcaggacggtttgttcgatccgcgcgatgtggcccggctcaaggaactgggcgactggctgaaagaatcgttctcgcatccgctggaggcacgcatggagcaatccggctgggagtataccctgacttttgcggagaaaaccgccgtgcgctatgtcgtgctccaggaggatatccgccagggccagcgcgtggaagcgttttctttggaagagcaggatgaatacgggctgtggcgggccatttatcatggctcgaccattgggcacaagcgcatttgccccgtttccacgcaaaccagcgctttgcgcgtgcgcatccgttccgcgcgcgacgccgtgaatatgctatccatccaggcgtattgagatagcctcgctttgggagatcggtccagcccgctggaatatgcgcgacttcgggaattcctcaatttaaaaggcggccccgacggattgcagaaatccgccggggccgctttttgttctgcctgcgcagagcggttatgcgtctatgcgcgcaagcatttgcgtgagctggttcaagtgcccgcgctcctgccgctcgatttcgcgaaacaccgcgcgggaattttcatcctgggtagcgctcgccagcgcggaatagaacaggatggaatccttttcggattcgatagcgccctctaaaatggcttgcgggctatcgaacccatgctttgcgcccagcgccatcaagccgccgggaaaaacgatttccgcggcgatcgcgctcaaatacgcgttggtatccgcgtcgtattccggggcgtcggggcgctcctgggcgacccgacgcgcgagcttttcgaattccgccagatggcgcgcctcatcctccgcgaggaacagcagcatgtccaccgcttcgggcgaatggctcaacttcgcggcgcgccggtaatattccccgccgcgccgctccatttccgccgcaatgcgcagcccttctatgtcgttaaacgaatgcacattcatggcgcttagcccagaaaatcgttgagctgcttcacgaggtcgttcacatccacgccgtgcacggcgcaggcttcttccaggctttcgccctgggaatgcgggcagcccaggcagtgcatgccggcggccatcaaaatgcgggcggtttcgcggttgatgcgcaaaacttcgccaatggtcatttccttagtgatcatagaggtcatctccttcctactctatcatcatacacgcatcggggaaaaaatgcaagcaaaatcttccgcagcacacagaatttgccgtccaggcaagctcaagcgaaaggaaaaacaaaaatttgtgaatatgccgctctaagtatattgaacgcgcttcacgcgcatactctttatcatcggcggataatctttgaaacggggtgtttcaacatggaacagacaatcaccagggcttccaagcgcgcgggctggagcgagcgggaaagcaaccttttgtgggaaacagcggatgaagcgcagcagcagggcttgccgttaaaggccgttttcgaccggatcgccgcccaaacgggccggcggcccaacagcattcggaactactattacgcccaggtgcgccagcgcgaaggcggctgcgaacgcccagcgcgctttgtgcccttttcggaagaagaggttcgctggctcttggacaaagtgctgcgcgaccgcgcccaggggcattcggtgcgttcctgcctgcaacggttggccgatggcgatcacagcctgatgctgcgctaccagaacaaataccgcgcggtaatcaagaaccggccggaattggtgcgcgaaatcgtggacgcgctcaatgccgagggcattgcctgcgaaccgcccgaagtcaaccaccgcacgcgcgcttccctgggcgacgcctgcgaacgcctgagcgcgaacgtcgcctggtcgggcgatgcggaattggtgcgcgccattgatacgttggcgcaattcctgcagggcttgcgcccttcctgcgatagcgcgctgtgccagacggcaaacgagttgatctgcgtgatcaaagactatctggcgcggccgctcgccgagcaggaaaatggcgtggccgaattttgcgacgctttgcgcgaacgcattggcgcgttggaagcttgccttccggtgagcgaatgaacatacagcggatttttgcccggcctccattggatgccgggcaatgcgtttttggctggatttcgccacaaaagcgggtgattgttcacagttcgttcaagcgggctcttaactccgttatagtttcaagcgctatagtaaagcatacccaagagggaaaaatcatcgggagtgagcaaacatgaagcacaaaagcatccgcacactgagcagcatggccgccctggccctggcgctgacgctgctggcgtcctgcgctatggccgaatcgctggacaccgctccggccgccgaaccttacatcgaactgagcacgcaatatcccgcgctcaccgtcaaggcgggcgatagccttacctttgacttggatctggacaattacagcggcgtttcacaggacatcacgctttccgtggcagaaattccggagggctgggaaggcacctttagcgcgggcagcaaccaggtcagcgtggtgcacgtgaagaatcaggcgaccaacagcgaggtgagcttcgccgtggacgtgccgctggaaaccgcggacggggaatacatcatccgcctggcggcgcagggcgaggactttgccgatgagatggaaattgccctcaccgtgagcgcggaagaaatcggcgagagcagcttcactgcggaatatccctcgcaggagggcgatgctaccacggactttaccttcagcgccacgctgatcaacaatacgctttccacccagaactattcctttacctccaacgcgcccagcggctggcaggtgagtttccagcccagcggcgagagcaccagcgtggccgcgctggacgtggaagcgcgcaccacgcaggccatggacatttccgtgacgccgccggaaaacgtggaggcgggcacctatgaaatccccgtgacggccacttctgtaaacgagagcatgcccattacgctgtccgtcaccatcacgggctcttatggactcacgctgagcacgcccagcggccgcttgagcctggacgcgtacgccaaccaggagagcgccgtgcagttgagcttgaccaacaccggcaatagcgacctcaccaacgtgaacctcacctccagcgcgcccaccggctggaccgtgcgcttcgccaatgaaaccatcgacatcatcgaggcgggcgcgactgtggaaaccaccatgtacatcacccccggcgaagacgccatgtccggcgactatgccaccaccgttaccgcccgcaacagcgacgcgaacgatagcgtggatttccgcatcaccgtgaagaccgaaaccatttggggcctcaccggcatcggcgtgatcttggtgctggccgtggtgattggcattgtgatgcgcaaatacgggaggcgctgaccatggccaacacgatcatcgaaacccgggggctcaccaagcgatatggcgcgctgaccgcggtggatgacctgaaccttgaagtgcggcagggggaaatcttcggcctgctggggccgaatggcgcgggcaaaaccaccaccacgctgatgttgctgggccttacggaacccaccgcgggcacggcgaccatcgcgggcgtggactgcacgcgcaaccccatccaggtgaagcgcatcgtgggctacctgccggacaatatgggcttctatccggacatgaccgggcggcaaaacctgcgcatgaccggtgccatgaacggcctttccggcgattatttggaagcgcgcatcgatgagctcaccgcgcgcgtgggcatggtggaggccattgaccgcaaggcgggcacctattccaagggcatgaagcagcggttgggcatcgccgatattctcatcaaggatccggatgtgctcatcatggatgagcccaccaacggcatcgacccggaaggtatgcacgaattgatggcgctgatccgcgagctggccgaaaaggacgaaaagaccatcctcatttcctcgcaccaattgcaccagatccagcagatttgcgaccgcgtgggcatctttgtgcaaggcaagttggtggcttgcggcgcgattgacgaactgggcaaacaactggagcaggagagcggcttccgctatgaagtgggggccaatcccgcgggcaagggcctgatcaaggcgctcaaagccgtggaaggcgttaccgaagtggaagaaaacggcgaaaccctgatggtacgggcccaaaccgacgtgtgcgacgccctggtgaaagccctgatggcggggaaattccacctgacgttcctgcgcccgtgcggcagcgacctggacgaaatctattcccgatattttgtaaaggcaggtgagcagaatgaaggcagccgtagcggccggatcttccgccatcgcaagggcgaagcccaggcgtgaggcgggcggcttttccacgctctacaaaaaggaactggccgaccacttccatagcgcgcgcttcaagctggtcttcgcgctgctgatcctcacgagcctggcgagcctgtatggcgcgctgagcagcatttccgacgcgacgttctccagcagcgagtatctgttcctggcgctgtacaccgccagcggcagttccatcccctccttcgcctcgttcctggcgtatctggccccgctggccgggttggccatgggctttgacgccatcaaccgcgaacgctcgcagggcacgctgaaccggctggtttcccagcccatacaccgcgacgcggtgatcaacgccaagttcctggcgggcgtaaccaccgtgttcatgatgatcttctttgtgggcatcatggtgggcggtttggggctggcggtgctgggcatcccgcccgaagcggaagagctggcgcgcatcttcgcttacctactgttcaccgtggtgtacaccgcgctgtggctgggtctggccattttgtgctccacgctgtgcaagcacgccgcaacctccgcgctgatcgtcatcgccgtgtggatttacttcacgctgtttgccagcatggtggtcagcatcatcaccaacatcgtctacccgctggagggcatcgagggatactataacctatataacaattatgccttgcagctcgatctggagcgcacgtcgccctattacctctattgcgagacggctaccacgctcctcaaccccaatgtgcgcaccatcggtatcactacgcaggcctccgtgtctggcgccatcgccagctacctgacctttgatcagagcctgctgctcgtttggccgcacttgaccgtgatgctcgcgctcaccatggccgccttcacggtttcctacatcgctttcatgcggcaggaaatccgggcgtaattccccctctctcttcgcccgccccttgtgaaacgccgtccgcccggcacatgccgggcggacggcgtttatagcgataaaaagcattgttcacttcaagcgctcatggcaggccgcgctgccctgcatgatttccacaatcacgcggttggtgttctgcatgccttcgcgaatgaggtggccgaggttttcaaacagggattccaatccatcggccaggatgccgtccccctcggcgatgctcatgccctgcatggccaggaacgcggcctgcaccgcaaggccggaggacaattccaccttattggcacagccttccttcgcgccatcgcagatcatgcccgaaatggagccaaggatgtttttcatggcgcccagcatggcgatttcgtccccgcccagcatgtataccacgccgaccgaggcggccaggcccgaggctacgccgcacgcgcacacggcggaaagcgtgccggtgaaggatttcacgtaaatgttcaccaggctggccagcgcggcggcgcgcagcttggtttcttcgggaatgctcctttcctgcgccacggcttcgagcgtgagcaacagcgtgatgccctgattgccgctgccggtggccgtcatcactggcagggatacgccggacatacgggcatacgacgcgctggcgcacagcaattgggctgtagaaaccggcgagcggccgatcacgccttgttcctgtaaggtgcgaatggcgcgccccaggccgaatttcaggcccgccttcgccacggcgagattcatttcgatgccttcgcgcaaaaaatccaactcacccaggggcacgctttgcgcaaagacgaccatatcggatagcttgcacgcgcgcagcgggttttccgcgtgcgcgttttcgccgggtacatagggagcaaacggcgcgtgttccacgcgcacgatgttggtgtgatggttgagcgtgagcacgcgcaccgcctcgcagtccgtttggaggatggtttcaatgaacaggccgggcacgtcctcgcgggtcttcacttccacccgtccggcggccaccagcgctttggccgcgtccacggcctgcgcagaaatgccctcgagcacgcacaaaagcgcgtctgggttgccacccgtcgcgcccatggcggcgcacagcgccacgccgcgctcgtccgccccgggaatgcccacgcacatggcgtttttgtagagatagggatccagcgtaaccgtgatatgttctaggcgaccccgggcttctttgcgcgcggtggcggcattcagcgcgatggccgtgggttctgtgcagccggtggacggggccattgcccggcgaatctccgcaagatagaagggccagttttgcccatgcatcgtttgcacccgctttcgtatatttgtatgcttccattatatcgttttttgccgcgcgatgcaaggaaaaaaccgggaaagggggtggaggaagggctggctgctggaatggattcaggctcccacctgcaatgcaggcgatcgccgggggagaattggcagcgttcctcttgtaaaagcggcgcgatttcctcccgccgctccaggcacacaattttcccccgggcataccatgcagtgtgggttttgcccgcagtggaaaatcgccaaggaggaatgagcatgtcattctacagctacaaaaacgccaatgcgcaatgctcgcccggctgcatttgcaccagcgcgctcgatggattgaaccagcgcatttgcatccaagtgaaaaatgtctacgattcctgcatgcagcaggagcaactcgacgacgtagtgatcacggtgagcgacatcgttcctgttttgcccgacaaatcctgccacgagaccaacacccgcccgtgtagctgttcctgcgctggcaacgcttgctcgtgcagctgcaacgcctgcggcgcgcctctttcctattcggaggccgtggaaaacgcggagaacgccaattgcccgctgccgcagccctgtggacagtggacgtttgaaagctgccgctcttcgaccacggaaggcacgatttccaacctcaccatcgaccgcctgtgcgaccgcccgcagttcgcgcgcgtgaaaggcacggtttccattcccatcgacgtgctgttcaccgaccagcgctgccaggaatggatcggccggggcacggtttccgtggtgaaggatgtgttgctcgccattcccgatgaatccatcgtaccgtttacattggaaagccttgtcagcgcgatttgcgtatccgggacttacatcggcaattgccagttcgagatcaccatctgcgtgaccatcgtgctcaagatcctcgcggaagtggagctgatggttccttcttacggctattgcgagattccgccgtgcgaggaattcgcggagaacgtgtgcgacgagttcttctcgctgccgctgttcccgcagcaaagcgcttccttccagcagatttgcaactgctcgaatggaaccgccgcaggcacgacggccaccagcaccgccaccaccgcgagcgcgaactgcggctgcgtgaacaatctcggctgccagcaggtgtgcagcacctgttgcaattgcggcacgacctgtgccggctgctcttcgtcgctgtgcccgcgttgcggcggcacgatgaccagttcgacttccgcgtaaccgcccgcgccaccccaggcggtttgacaataggcggcggcagttccccgcagggtatcggtttttcctccttacgaaagcgcgccgccgccaggtttacatgggggaaggggcagccttcgactggctcaacgcgagccgaagagggcagccccttcttcattgcgcaaaagggcgcgcaaatgcgggcgagctgtataaacgcaaacggcacagaaaaaggactgcctcgcttgagacagtcctttgctggaggtgccatccggattcggaccggagaatgagggttttgcagacccttgccttaccacttggctatggcaccatgccctttatggtacacaaccgcgcaaaagcgcggctgtaaaaaacatggagcggtagacgagactcggactcgcgaccttcgccttggcaaggcgacgctctaccaactgagctactaccgcacatggtgccttggggcggaatcgaaccaccgacacgtagattttcagtctactgctctaccgactgagctaccaaggcaaattggcgacctggaaggggctcgaaccctcgacctccagcgtgacaggctggcattctaaccaactgaactaccaggccgcattatggtgggaacaacagggctcgaacctgtgaccccttgcttgtaaggcaagtgctctcccaactgagctatgctcccggggaaccctgaagttcatcatcgcacaagcgacggatactataatacacgatatcagcccttctgtcaaggggatttacaaaattttcatgcacaaaatttgcgcgaaaattttggctataactgctgcgcgcctctgtcgttattccgccagcatttggcacagcatttcgcccgcttcgtcaaaggacacgggttcgccgcgaacagagcggatggcgcgctccacgggattggcgatgggccggggacggggcgcggcgagaatttccgcggcgagctgggggagggtgcggatttccagggaatccagcttgcgctccgtggccatgcgctccagcagcgcgtagagcaccgtgccgcaaggcgcgtcggcattgagttgcaaggcgcgggccagcgcggggagcgttttttggaacagatattggcgggcgtccatttcgccgtcgctggcgctggcgcgcgcgagcaggcgcgccaccagttccgcttcctccatgggcgcgatgcaaaagcgcgtgcccttcatgcggcaaatggcgcgcatagcgtcgcgatagcccatcttcaggtttttctgcgtgtacttgggatcaaagcccaaaatcggccccagcgactcggcaggccgaatggtgagcacttgcacctgggggtattcgaatttgcgcgagcggcccagggaaagcgtgcgcacggccacgagctgctcatagccgcgccgggcgagcatgttcatggggcagttgtcgtaaaaaccgccgtcaatgaacagcttgccatcgaggggttctaggcggaaaaccggcagattggcgctggccatcagataatccaccagcttgccgcgagggatgtcctctttgaagagttccgcgtgcttcaaatccgtgaggtttacggtcacaatgccgaaatccgtgttcatggcccgcaacttgggctcgttgatgacgatgttcagcaacctgcggatgggcgcggtgtccagcccgcgcttttccaccaattcgcgcgcggccgtggcgagataggagagggtatcccggtcgaattccaggctcagcaggcgatccagccgttcatcctgcgtgtcgaagagcatattcgccgtcagccgttgccaccaggcctgcgccagttcaaaatcgccttgcgccagcagagcgccattgatggcgccgatgctggtgccaacgatgccatcaaagcgaaagcccttttcgttcagcgcttgaaacgcgccaatctggaacgcgccacgcgcgccgccgccttcgagcaccagaccaagcatgaaattcgcctccttccgccgttcgtccgcagcgccttataggttcaggagccgcgccgcgttgtcataaaaaatggcttgcttttccgccgccgtgagcgcgagcgcttccaggcggcgcttttcttcgccgggattccacatgggataatcgctgccgaagagcacgtgatccacgccgaacgcgcggatgatctccgcggcccgttcgggcgcgagcgcgaacagcgaactggacgtgtccacatatacgcccgtgccgggcagcaagtccacggcctcttcccattcgctgtagccgcctaggtgcgcgcaaatcgccgtgaggccggggaagcgccgcatcacctcggccatgcggcgcgggttggaatagggatagcgcttatcgcccgtgtggatcagcacgggcaaacggccctccaaagcctcgaacattttgagcgagcgcggctcgtcgagggcgaatagctgcatatccgggtggatcttgatgcccttgaggcccagggagatcgcgtaatcgatgtctgcctcaatatccgggctatcggggtgcagggtgccgaaccccaccagcttgtcgggatgttcgcgcacgcactgcgcgatgtaatcgtcgatgtggcgcgtgcgcttgggcgacatggccacggagtgtacgaggaagcgggtgatgtcgtttttcgcgccaatttcgagcagcgtgccgagcgtgccgtcgcaaaggacgggaatatcataaaattcggcgatgctgtgcgccgctttcagggcgatggcgtcggggtagatatgggcatgcgcgtcaaaaatcatggattcaccttccggttcgtttggtattttacccgtttattgtagcagacgattgtaaactgcgcaatccatgcagcgcaattctgctggcggcttctatggcgcgcgaggcgcatgtgcgcccggcaggcactggataaccgtccggctgaaaaaggaaggcggagagcgcgtgcgcgttttcatccaggcgcgcagcgcagaattcgcgcgtttccgggtggtagagcagcgcgcccacgatgtcgctccgcgtgacgtagttgatggcctgcgcgcgcaggcgggctttctgggcgcggtcgagctgatcgcgccggaagccctgtccattgaaggcgacggcgcgcgcctgggggttttgcgccacggcgagcgcgtagagcgcgttgtgcccgcccttggaatggcccgtgatggtgagcggccccgcgggatagcggttgaccaggcgatagatatcctggtattgtacggaaccggcgaagggcgcggcgaaattgtcggcccaatccaccagcgagggcgcgcaaggcccgctttccgagccgcgcagagccagcgtcacgctttcatccggcgcgaggaacgaatagcccacaaagcccgtgccggcgttccggttgacatagtgcagcaccagcaggcgggtttcgcgcagggcgcgcagcgcctgttgggcaaaggcgctcagttcttcgcaaggcggggtttgcagaaaggcgtcgcaagcttcgcgcaggggaaatggcccgcgcgccaggcggcgtaccagcgcgcatggcaaatctatgtaacagaattcacataaccaggccagcatttcgggcggcatagggtcacgctcctttcagcgggcaaaagcccatagcattgtatgccacgcacccatcgggcgctttgggcataggaatgcacacggggcaaatttgggcaaaggccccgaaaaaaggagatatgcggtttgacgctttatgatatggctctggggagcgcgggcgcaattgtgcggctgggcgaaagcggcgcgatgcggcggcgcttgttggatatagggtttacgcagggcgcgcaggtgcgctgcgaactggcgagcccatcgggcgatccgcgcgcctatcgggtgcggggcgcgctggtggcgttgcgccaggaaaacgccagaaacatttttgtggagggatagcatgagcagggcggatacgagctgcgtgattgcgctcgcgggcaaccccaatgtggggaagagcacgctattcaaccggattacgggccttcggcagcatacgggcaactggccggggaaaaccgtggaaattgcccagggcacggccaaggcggacgggagcgtgcgcgtggtcgatctgcccggcgcttattcgctgatggcccattccaaggaagaggaagtggcgcgcgattttttgctattcgaacgggtggacgtggttgtggtggtgtgcgacgctacgtgcctcgcgcgcaatctgaacctcgccttgcaggcgctggaaatgggcaagcgctgtgtggtgtgcgtcaatttgctggatgaagcgcaacgcaaccacatttctctcgatttgccgcgcttggaagcgctgttgggcgtgcccgtggtgggcgcgagcgcgcgcggcaaccggggcgtgggggagttgctgcgccgcgcgcgggattgtcccgcgccgcgccgcgcgctggatatcgagtatcccgcgcccatcgcgcgcgcggtggacgcggtagccgctcatatgagcgcgggcgcgtggaaccggcgctatatcgccctgcgcctgctggagggggatatgacctttgccgcgcgcgtccgcgcccagagcggcttgccggaagcggcgctgcggcaggctcggctggagcgcgagcgattgcggcaggcgggttatgacgaagatacatggaacgacgcgttggtggcggcgatttaccggcgcgcggacgccatcgccgcccaggtggtaaaggaagcgcccgcggcgcggctcgaatggcagcgcgccatggaccgcctggttacgagccgccgggcgggcataccgctgatgcttctgttgctcacgttggtgttttttctcacgatcgcgggggccaacgcgccgtcgcagtggctttcgcggcatttgctcggcctgcagggggatctgctggcgggactgctggcatggggcgcgccggaatggctggcggacgcgctggccaacggcgtgtaccgcacgctggcctgggtggtttccgtcatgctgccgcctatggcgattttctttcccttgttcacgctgctggaagacctgggctatctgccgcgcgtggctttcaatttggatggcgcgctgcgccgttgccgcgcgtgcggcaagcaggcactcaccatggcgatgggctttggctgcaacgccgtgggcgtgatgggctgccgcatcatcgattccccgcgcgaacggctggtcgccatcctcaccaacagcctcgtgccctgcaatggacggtttcccttgctgctattgttgatcgcgatgtttttcgcggggaacaattttgtggtcacggccgttttgctcacggccgccgtagcgctaggcgtgttcgctacgttcttcgcctcctggctgctttcgcgcacggtgctgcgcggcatgccctcggcgttcgcgctggaattgccgccctaccgccggccgcaggtgggcaaggtgattgtgcgctccgtgctggaccgcacagcctttgtgctagggcgcgcggcgatggtcgccgccccggcgggattgctcctatggttgatggccaatgtgcgcgtgggcggcgcgagcctacttgcgcacggcatagcgtttttcgatccgtttgcccattggattggcctggatggcacgctgttcatggcctttctactgggctttccggccaacgaaatcgtgctgcccatcgcgctgatgggctatctggccgaaggcgcgctggtggaaacgggcgatgcgcttcagcttcgcaccgtactcctcgccaatggctggacgctggaaaccgccgtttgcaccctgctgttttcgctgatgcactggccgtgctccaccacctgcctgacgatttaccgggaaacgcgctcctggaagtggacgctgctggccattttcctgccaacggctttgggtttgtcggcctgcgcgctggccgcgtggatgctttaagccaaaaatgctcccgccgcgcgttggatacggacgcgcggcgggaaattgttagctcgcggcgcgcgcgtttgaggaacgcgcgccgcaaaagtgagggggtcggttaacccagatacaggtcgatgatggcgttcacatcggatacgctcagcctgccgtcgaggtttacgtcggcggcgagctcctgctcagcccgcgtggtcgaacccaagaagatgtcgatcgcgaggttgatgtcgctcacgctgattctgccatcgcggttcacatcgcccgctacggagaggacagccgtttcgatgtcgctgcccgaatcatcgagcatggtgatggtgtaacccgtctgtacagtggcggtcgcggcaacggaagcgccgttgcggtcggtcacctggaagcggcccaggccgtcgttgaggttgagcgtcagcgcttgcgccgtggtgcccgccgggatgttgtacagatagttgatgcccaattggctggtctgccggtagggcgcgcccgcgttcaccacgatctggctatcgagcgcttcgctgcgcggttcttgatagacgttcacggtgatgagctgttgcaggttgttggcgtccttccagaggatcttcagggaggactggcgcgcggtagtgccggtgttctgcgtgaccatgatgccgatggaggcgttgccgctgccggtgatggtgcgggccgcgttggcgcccgtgggatctgccgtgcggttgtacaccgtgagccaggcgtcagtggtgtcgatcgtccagttggtgttggacgagaggttgaacgtgccgcccgcgccggcgcggtaggtggccagcaagctctggttggtcagcaggtcggtggacagccggggcacaaaatcctccagatacacgttgatgccattttccttcgcgtacacatgcgccgcggaattttccacgcagcggatgcgcaggttcttgttcgcgtctttaaaggcgcccgtcgcaatggtggtcacgctatcggggatggtgatgtcctccaggctggagcaattggcaaacgcgtagtcgccaatgtaggtcacggtggtcgggatgctcactttcgtgaggctggtgcagttgtagaacgcgtaggggttgatgctcgtcgccccgctgttgatcgtcacgctggtgaggttcttgcaggactggaacgcgcggttgctgatcgtcttcacgctcgaaggaatgatcacgctggtgaggttcgagccctggaacgcgctggttccaatggaagtcaccgtggtggggatcgagatcgaggtgatcgaactgttcaggaacgcgttcgcgctgatcgaggtgatcgtcgaaggcagcgttacgctcttcaggtagcgcgagttggcgaacgcgccgctcgcgatggagacgatggtcaccttgccgttgtccgctttgaagtcgctcagatccaggctggacatgttcatggccggcgggaaccgcagcagcgtggtgctgtagctgcgggagaagagcacgccgttgaaatccaggaaattggggttgctgccatgcacttcaaacgcggccaggttcgtgcagccgtccacaaaatcagaactgatgctggtgacgctgctgggaatgtagagcgaggtcagcttcgtgcagccgctgaacgcgccggagccaatgctcgcgaggcggtaactcgtacccttgcccgccgcgcccgcgtaattggcgagctgcgtgcagccggcaaacgctttcgcgccgatgctcgtgagcgtcgtggggatcacgatgccggtgatgcgggtgttcatcaacgcgccttcgggcagggccaccaggcccgaggggatggtgaaggcggtcagatccgtgttcgcaaaggcgtaagcgcccatggaggtcactttctgcatgccgctcacctgcaataggtcggagccttcgaacgcgttcgcgccgatggtgacgatgctatccgggatatacacgctggtgatggtcttgttcccctggaacgcgccatcgccaatggtggttaccatatagccgttcaacatttgcggcaggctgatgttgctggcggagccggtgtagcccgtgatggtggcggtgcgcccgctcaccgtgaacttatagtcgccggagaccatttcgccgccgctgggatcgtcgccgccgctgctctcgcccacgatgatgctcatggtatcggccgggccgtaaacgcgcacgccgttcacggtggcgtaggcgctcaaggctacgctgtaggtcgtgttgttggcaaagttactgctggcaatcacaatggtgccaatcgccgaactcgaaggcgtggcgatggtaatggtcttgccgccgccggtcatttgcaggcgatagccatccgcgtccttcacgctggtgaaggagatcgtcgtggtggtaggcgccgcgatgttcagcggatccgcgttcataatgaccggagccgccgggcccacggtgatgttgcccttggcgatcacttcatcgcccacgcgcacttcgaagggatagctgcccatcgaaacgccgatcggccaggagagcgttaccgaaccgctctcagaaatggtgccctttgccagggagacgctggagttgttgaagaacacttcagccgtttcgccccggtgcgcctggccgatgccatccacggtgacggagacggtttcgtccttgccggaatagggcacgacttcggggctgatggttaccgtcagcgatttgatggaaacgcgcacggtggcgatgtcgctatacacgccgcccgactgcgcgcgcacgccgatggtaaaggtttccgcgtccggcaaagaggcagctgggatggttacggttttttccgccgtctgcgtccaagcgccataagcgccggtcgcttcgtcctggaaggcgtattcgtaggttacgccatattcattcttcacatcgtccgtgaaggtgagggtgtagccgtcgcccgaggaaatcgtgtcctcgctgctggagagcacgggggtggcaggcttcacggtgagggagccaacctcgccgatttgcggccaagcgccggcgccgtcctgatacgtcacgcgcaccgtgtgctcgcccggctggctcagcgccttgaacggataggccgtgctgccgatttccagggtgatgttgccgtttgcgtcgcgcagggcgtcggtcacctgaatgttgtcgttcttttcgccgctcaggttcacggccaggcgctgcgcgtcttccggcaggttatagatgacgagttcgaacttcgcgccctccgcgctcatggaaacctcgtccgtggacagggtgtagcgggggagggagctctcgatgacgagggccacatccagggaagtcgcacgcaccacagaggggtccgccgtgttctgcaccaccacgagggaaatctgactggaagtcacattcgggatggtgagttccatgggctggctcaggtcggtgaagagctgcgtggtcgcgccatgcgtcatgcggatggaaaccacgcgcggatccaggttcgaagcggagatgcgcaccgtcgcggtgccgttggcatccagcagcgcttcttccacggtgaaggtgccttccgcgagcggctgcgtgcccacggccacgttcacggtggcgggcttgcccaccacggcggtttcaccgctgcccttgcgggcttcgatggtgatggcgtagctcttgccgtcctcgaaatagctgccggggatggtgatgttggtgccagtgatggtcgaatgctcttggccgtcgatcttcacgatgtagtccgtcgcgccagtgacttcaccccaggtgatcgtcagcgcttcgccagctttgtgctcgatctccgtgcccgaggtgattgcgggaacggcgggcgcgatctggatggaggtcgtaagggctttaatctcttctccatccgcggtgaagagcacttggatggcggagaacgtagaaccattaatggattcaatggagaatgtcgtttcgatttttaccgtgccgttttcggccttaaactgcgctggctcgaatttggcatcagggagtgaggcaatcgtaatgctgtctacgtctaccccttcgatttcggcggagagggtatacttgccgttttcatccgggtagagcagggtttccggcgctttcacaaagcgcgggctgccctcgttggtcagggtgatgcgggcaatttcgctcatctcgccgccgcacagcgcgcgtacgccgaaggtatgctggccggtgctctcaaagtaagaagcggggatggtgtagctcgtttccgtcaggtcgcttgccactttgtcccaatccgaatcttccgtgccgtccgcgtcgtccttcaagatgccaatggcgtaggtgatctccacgccctcggcatactggtcggtgttgtaatcccaggtcagcgtataatcctcaccgggcgtgtaagtgccgctctcgtctacttgcggcgcttccaatttaacttcaatgcggagattgttcgtcgtttccggataataccactcatcgtcgctgccttgataagaagcgatgatggtgtatttgccgggggtcttcaacagagcgttcacagcttcatccgtcgtgataaacgaggcgttgccttcctctactgcgaagtattccttttgcttgttgccagccgcgtcctgcacgttgatgcaaacttgctgtacgccttctggcaggttctcaaaggttgcggtgatgttgtccgcgtcggctacaacatttacggtcaccggatgcacatactccgtcaccttgaaagcctgctgggaaaccacgccgttaaccttggcttcgatgtagtaatcgccagcctggtagattgcatacgtatatttgctgggctcgccctctgccgctgtaagtgtgtcataccatgcggcatctttactatagatgcgcacgtagtctatggtcgcgccctcaggcacggtgacaatggcggttacggtcgcgctgccttcgctattcagcgccacgtccgcaacatcaatgcccacttccggcgcgtcggtagcggtcaaagttacttccagccggtcgccttcgaatgtttcctcgcctaccctggcgattgcgcgcacggaatacttcgtgccgtacttggcgaggtcggaagaggagagatacagcttggtatcagtggcagactggatggcgatccaatcttcttcttccgcgtcgaccggcaggccccaatacgatacttcgtaagcaatgtcagcgccttcgtatgtcacatccgattcccagatcagcgtgtagctcgcgccctgcgtgtatgcgggttccgaaacgagggtcggagcaacgggaacgaaagtgatggtatcgcgcagcgcgtagtccgcttcttcctgttcggcgttttccaacttgatgtaagacgtaactttgtaggctcccggggttacggcgcttgcggtgagggtaacgccatacatgccatccttgatttcgggatcggccaccggtcccgtgccggaaccgttgttcacgctggtgttgatgacggccactttctcaggaagcccggtgatcttcacatcgatcaacaatttcccgtcttcgatgcgggttcgagtatcgatctgcggatcatattcgtccgcgttccgggtctctacgttctgcgactccgtgctcatcagcgtggcgccattttcggcgtcgctgggcgtctggccgccttcgccctcgctttcatttccctgctcgccttcgtcggaagaaggttcgttgttctcttcttccttcggctcgctggaatcgcctgcgggcgcgcccttcacttcgaaggaagcggagccgcattcaacgccatcgagatacgccttgatggtgtagctgccagccgccaatggcatatctttggggccaaaggcagatgttccgtctgcatcaacctttaggttttggtggttgctggtattgcctccgccttccattacggttgtggcattcccggcgttggccgggaagccgctgaagctggcggaaactttggtggtgccatccgcgttggcagtggcattcacactgatacttacgctttccgccaaggcaaagccgctcatcgaggtgatgatcagcatcagagccatcgtcagcgcaagcactcgtcctttcagtttcatggtcaattccccctcaaacaaggtatttgtatccatctgccggtattctatcatatgtttcggctcttgtcaattggtgtgacgaaaatatttcaaattttcttgattatattacatcgacaagattttccttcatagctggcagaaaatggcagcgcgggataggcgaggatttgtcctatataatagtagaaaaagtttttgcacgtggtgaaatggctcgaaatatgtcgaaggcaaaaaacaaaccccggtctgttggcagaacggggttgaaatatttgtgtaacagactaaggtttctttttctcggcacgcaattttttcttccagcccagcagcaggcggtaaatgcgcttgccatcgcgcagggtatggaagtgggaaccgcggttgttatcgatataaacggtttcgatttccacctcgcggatgggcaggccgcggcggcaggcttccagcaacatgtgcatctcgtactcgtaccggtcgccctccagttggcggcacacttccagaaagctttgcggaatgccgcgcaggccggtttgcgtatccgaaatccagcggtgcgacaccagcgcgaaggtgaggcaggtgagcgtgttgcccattttggagcgaaggggcatttcgcgcttgcggcgcacgcccagcaccagcgcgccatcaatggcacgggcgattttttcgatatcgctgggggtatgctgcccatcgcaatcggcggtgaccacattaaaggccccgcccagcgcctccagccccgtgcggatggccgcgcccttgccgcggttttgcgcatgccgctttagcgtgcatagctgggccgcttgggcaaagatggactcgtactgcgggccgctcccatcgtccaccaccaccaggctatcgatgaaggtgcgctcgcgcagcgcgcggagcagatcgagcaggctttcatccggcttgtaagccgggatcactacggcggttgccatcatgaaactccttgatccagaaaattggccgcatgcttctaaagaagcacgtactatatctattgtattataccatgtttgcggctgaaaaaccaattccaaattgcgcaaaaaactgtgacgaaatccatacgaatcaaatttgacgtaaaaacttcaaagcgtggcaaatgatgcaggaaaacttgcaaagtaaatgattggttaaaactgaaaattccagcaggaaatcgcgttttttgccgttgcgatgaattgacatgcggcaaaaaacatgctataatactaaattgcactcatatggacaaagtgccggatttcctgttctctaacggggaaacctcccctttttcggcgcttgcgctcattgtacaccgttttgggcaaaagtgcaataggggaaatcgcgaaaattttacgcggtctggcatgggaagttttcatgaattgcaaggctcatgaaggggtgattgcggaatgcacgaggtgcagcaaggaaagcggacgaggcaattcttttccaagattcacgaagcgctcgaggtgccggatctgattgaggtgcagaagcgctcgtatcagaactttctcgacgagggattgcgagaggtgctcgctgacgcatctccgattaccgattacagcgaaagcctgatgctggagttcgtcgattattcgctcgacgagccgaagaacacgattgagcggtgccgcgagcgcgaccttacctttgccgcgccgctgaaagtgacggtgcgcctcaccaaccgcgatacgcacgaaatgaaggaaagcgaggtcttcatgggggatttcccgctgatgaccgagcacggcaccttcgtgatcaatggcgcggagcgcgtcattgtcagccagctcgtgcgttcgccgggcgcgtatttctcctgcaccatcgataagggcggcagccacctgtatgccgcgcaaatgatccccaaccggggcgcgtggatcgagttcgaaaccgattccaacgccgtggtgtattgccgcatcgaccgcgcccgcaaactgccggtgacggtgcttttgcgcgccttgggcgtggaaagcgacgcggaaatcatcgatatgttcggcggggacgagcgcgtttccgccaccatcgcgcgcgacggttcggcggaggaaaagagcgaacacagccgcacccgccgcgaacaggcgctgatcgaaatttacaacaagctgcgcccgggcgaaccgccttctgtggaaagcgccacgcagctgatgcacaatttgttcttcgaccccaagcggtacgatctcgcccgcgtgggccgctataagttcaataaaaagctggcgttggccctgcgcatcgatggccgcgaagccgtggaaacgctggcgcatcccgccacgggcgagctgctggtggaagcgggcaatgtgattgacaccgagaccgcctggcgcatccagaacgcgggcatcaaccgcgtgaccgtgatggtggatggccgcgaaatcaacgtgatcggcaacaactttgtggatttccgcacttatatggaagagagcgagccggaactgtataagcagttcgacgaggaaaaggtggatgtgcgcgagcgcgtacacctgcccaccctgctctcggtcatcgagcgcgtgcgcgccgacggcgtggatttcaaccaggccttgaacgacaacatggcccagttgattcccaagcacattttggtggacgatattctggccgcggtgagctaccagttcggcctgttctacggcatcggcgatgtggacgatatcgaccacatgggcaaccgccgcctgcgctccgtgggcgagcttttgcaaaaccagattcgcgtgggcatgtcgcgcctggagcgcggcgtgaaggagcgcatggccatccaggacttgagcaaggcgcgcccgcaggatctgatcaacatccggcccgtttcggccaccatcaaggaattcttcggttcctcgcagctttcgcagttcatggaccagcccaacccgctggccgaactcacgcataagcgccgcctttccgcgttgggccctggcggcctgaaccgcgaccgcgcgtccttcgctgtgcgcgacgtgcactattcgcactattcgcgcatctgccccattgaaacgcctgaaggcccgaacatcggtctgatcggttctctggccacctacgcgcgcatcaacgattatggctttatcgaggcgccttaccgccgcatcgacaaaaagaccggtaccgttaccgacgatatcgaatatatgaccgcggacgaagaggaccgctatgtcatcgcgcaggccaccgagccgctcaccgaggacgggcacttcgtgaagccgcgcgtcaccgtgcgcaagcgcgaggaaatcatcgaggtggacgccagccaggtggactacatcgacgtgagcccgcgccagctgatttccgtggccacgggcatgatccccttcctggaaaacgacgacgcgaaccgcgcgctgatgggctcgaacatgcagcgccaggccgtgccgctgctggtgccggaagcgcccatcgtgggcactggcatcgagtataaggctgcgtgcgattccggcgtggtgttgctcgcgcgcgaggccggcatcgtcaagcgcgtgacggcggacgaaatcatcatccgcacggacgagggcgcggatcaccgctaccggctttccaagttcgtgcgctccaaccagggcacctgcatcaatcagcacccgatcgtaaaagagggcgagcgcgtggaaaagcgccagcccattgccgacggcccttccaccgacgagggcgaaatcgccctgggccgcaacgtgctgatcggctttatgacctgggaaggctataactatgaggacgccgtgctgctcagcgagcgcctggtgaaggacgatgtttacacttcgatccacatcgaggaatacgagtccgaggcccgcgataccaagctggggccggaagagatcacgcgcgacatttccggcgtgggcgaagaagccctgcgcgatttggatgagcgcggcatcatccgcatcggcgcggaagtgcgcgcgaacgacatcctcgtgggcaaggtcacgcccaagggcgaaaccgagctcaccgccgaagagcgcctgctgcgcgccattttcggcgataaggtgcgcgaagtgcgcgatacttcgctgcgcgtgccgcacggcgagttcggcatcgtggtggatgtgaagctgttcacgcgcgaaaaccgcgatgaactgtcccccggcgtgaaccagatggtgcgcgtgtacatcgcccagaagcgcaaaatctccgtgggcgataagatggcaggccgccacggcaacaagggcgtggtcagccgcattttgccggaggaagatatgcccttcctggcggacggcacgccgctggatatcgtgctcaacccgctgggcgtgcctagccgcatgaacatcggccaggtgctggaagtccacttgggcctcgccgcccgcgcgctgggctggcacgtagccaccccggtgttcgatggcgcgcgcgaggaggacattgtcgagctgctcgacatggcaggcaagaaagaagatagcggcgagctcttcgacgcgaagggccggccgaccatccagttctccaagtgcggcatcacatccaccggtaagctggaattgtacgacggccgcacgggcgataaattcgataaccccgtgaccgtgggctatatgtatatgctcaagctccaccatctggtggacgacaagatccacgcgcgcgccaccggcccctattcgctggtgacgcagcagcccctgggcggcaaggcccagttcggcggccagcgcttcggcgaaatggaagtgtgggcgctggaagcctacggcgcggcgcacgtgttgcaggaaatcctcaccgtgaagagcgacgacgtgtccggccgcgtaaagacctacgaggccatcgtgaagggcgaaaacatccccgagccgggcattccggaatccttcaaggtgctgatcaaggagctgcaatccctggcgctggatatcaaggtgctttccgccgataagcaggaaatccagatccgcgagctggacgacgatggcgacgacgagagcgaattcaaggacgagctttcgcagggcctgtcgctggaagcctttgcggatgaggacaacgaagcggatacgtttgatttcgacgatctcgagctgggcggcgacctgtttgacgacgatttttaagatagaagggagcgatcaccttgttcgagctaacgaaccttgattccattcaaatcggcctggcttcgccggagaagatccgcgaatggtcccatggcgaagtggaaaaggcggaaaccatcaactaccgcacgctcaagccggagcgcgacggtctgttctgcgaacggattttcgggccgaccaaggactgggagtgcaactgcggcaaatataagcgcacgcaccacaagggcgtagtgtgcgataagtgcggcgtggaagtcaccaagagcaaggtgcgccgcgagcgcatggggcacatcgagctggccgctcccgtgagccacatttggtatttcaaggggattcccagccggatgggcatgctcttgaatatccccccgcgcgcgctggagcaggttttgtatttcgcctcttatatcgtgctcgacccgggcacgacctcgctggaaatgcaccagctgctctccgaaacggaataccagtatgtgctcaccaaataccaggcggacgaaacgggcaagccccccttccgcgtgggcatcggcgcggaagccgtgcgcgaaatgctgcgcgaaatcgacctggacgtcctggccgccgagctgcgccaggaactggccgatctggccgccaagtccacgggccgcgacagcgagggccagaagcgccagcgcattgtcaagcgcctggaagtggtggaggctttccgccagagcggtaacaaacccgaatggatgattttggaagtggtgccggtgatcccgccggagctgcgccccatggtgcagctggatggcggccgcttcgccaccgccgatttgaacgacctctaccgccgcgtgatcaaccgcaacaaccgcttgaagcgcatgctggaaatgggcgcgccggatatcattgtgcgcaatgaaaagcgcatgctgcaagaagcggtggacgcgttgatcgacaacggccgccgcggccgcccggtcacgggcgcgggcgggcgtcagctcaagagcctttccgacttgctgcgcggcaagcagggccgtttccgccagaacctgctgggcaagcgcgtggactattccggccgtagcgttatcgtggtcggccccacgctcaagctgtatcagtgcggcctgcccaaggagatggcgctggagttgttcaagccgtttgtgattcagaagctggtcacgctgggcctggcgggcaacatccgcagcgccaagcgcgccgtggagcgtgtgaagagcgaagtgtgggacgtgctggaaagcgtgattcgcgaccaccctgtgatgctcaaccgcgcgcctacgctgcaccgcttgggcatccaggcctttgagccggtgctggtggaaggcaaggcgctcaaggtacacccgctggtgtgtactgccttcaacgcggactttgacggcgaccagatggccgtgcacgtgccgctctccatggaggcgcaggccgaggcgcggttcctgatgctttcggccaacaacatcctaaagccgcaggacggcaaacccgtcgtttcgcccacgcaggacatggttttgggctgctattacctcacgctgatccgtccgggcgcaaagggcgagggccggtatttcaccgacctggacgaggcgctcatggcttacgacactggcgaactctcgctgcaagccaagtgccacatccgcctcaagcgcacgttcgagggcgaagaatacgaaaagatcgtggagaccacggtcggccgtgtgattttcaaccaggccatcccgcaaaatatggggatgtgcccgcgcgaaaccgtggatgatatgttcaagctggaagttgacaaggtcgtggacaagaaggaactgggccgcattgtcgacaactgctatcgcgcgcacggcgtaacggccacggccaccatgctggataacatcaaggcgctgggctttaagttctccacgcgcggcgcgattacggtttccgtggcggacatcatcgtgccggaaaccaagcagacgatcctggtggacgcggaaaagcgcgtacacgataccgagcgcgcgttccgccgaggcatgctctccgagcg

SEQ ID NO: 4548 - DNA, 2026 bp, Unknown
  16S sequences of unknown bacteria
aatcatctgatccagctcgtccacgttcaaagcggcaggcttctcgcagatgacatgcttgccggcattcgacgcggcaatgcagatctccatgtgacagtcgttcggcacggcaaccagaacagtgttgatgtcctcacacgcaagcaaatcctccagggacgaaaatcccctgagcccgctttcctccgccacctgtacccgcacggggtcaatgtcgtaagcgcctaccacctgaaccccttcaattttggaagcgtttcggtgatgaaatccgcccattcctccgtagccaacaattcccaattgaatccccatgttcattttcctccattctttgctgcatttttgcgctgcgtttgatttcctgaaaacaactttcatccgatcggatgggacaaattcacaatcatgcccggccttttgaaaacattatatctttcgaaacacatacttacaattaacatgattatttatcctcatatactgttgaacaactgcagcattttaaaaagatgttccgagaatattttccttggaacttgaaaatatggtatccgctcaagtctcctcaatccatatctttttgccagtcgcacagttcagtggaatatccggttggttctggaaaatcagacagcttgattccgtcactccgtaatttgcttcaaaatactgttccgcataacatttcataaatcattaattcataaaacttgtacgccttgcagatttggaaatcactcactttagaataaaacagattttccctcgtgtcttgctgaaatcaattttggccaatatctgacagctttttaaggcaacaccgcacaaagaaaaaatatgatataataatactatggataagcagatgagtctgtcgggcctgagcgatgaattgagccaggtgcggacaaagaagaaagaatttctgagtcagatagagcgcatcgtgccgtggggagagtggatcgaactgatccggccgcactattacaaaggagagcgcggcaataagccctacgatctagaacggatgctgcggatttatctggttcaaaacctgtatgatctgtcggacaaggcaacggtagcggaagtgatcgacagccgtgcattctcggaattctgcggagtggaatcgagcaatcaggtgccggacggagatacactgggtcggttccggaatttgctgctccgcagcgggctgcaggagaagttgtttgcgcaggtggtatatctgctgcaggaaagaggcctgctgctgaagaagggaaccatagtggactctaccctgatcgcagcgccgtcctcgacaaagaacagggaaaagaaacgagacccggaagcgcactcggtgaaaaaggggaacagctggcacttcggctataaagctcacatcggcgtggataaagacagcgggttggttcacacagtaaaggtcaccagcgccaacatccatgatgtgacgatggtgccggagctcttaaccggcgatgaggacagcgtatatggcgacagcggctgcctgggcgctgaaaagcgggaagacgccgttcttttcaatgtcaatggccagggcaaaaggatccgttacaaaatcaacagacggccctcgcagagtaaacacgcagacaatcgttcccgcgggcagatcaaacgccgcgaaaaggagaaatcctccgtacgggccaaggtagagcatgtctttggggtagtaaagggccagcttcgataccggaaaactaggtaccgaggtctgcgaaaacagattgccaaattgaatatcctgttcgcgctggcgaatctgattctggctgacaggcgatcctgcctgacggcttaaatcagtgtggctgcagcgctgatggaatggcgtatatatgccctgccgggtggaatcttcccgcagggcctttccttttgcgtgttctgcggtgttgccataagagtaaagccgggatttgccacttgatagcaaagtcccggcctttcttgtgcctaaaaactatttgtaaatcagttc

SEQ ID NO: 4549 - DNA, 10597 bp, Unknown
  16S sequences of unknown bacteria
gacggggaaggtcgccatggtcggcgacggcatcaacgacgcccccgcgctcgcgcgcgcgagcaccggcatcgccatcggagcgggcacggacatcgcgatggagagcgcggacatcgtgctcatgcacagcgacctacaagacgtgccggcggcgctcgatctctcgcgcgcgaccatgcgcaacatcaagcagaacctgttctgggcgctgttctacaacgtcatctgcattcccatcgcagcgggcgtgctggcaccgctcggattctcgctcaacccgatgatagccgccgcagcgatgagcttcagctcgctgttcgtggtttcgaacgcgctgcgcctgcgcacgtggaagccgtcgtttgcgagcaagcgctagcggagacggcgggatggcggcagacggcaagaggcgcggctgccgcgaagcatcgatataccgacaaagccaagagattggagacctgatatggcaacgaggaagaccctgaacgtgaagggaatgcactgcgagaagtgcgtcgcacgggtgaaaaacgcgctcgagggcgtggacggcgtgcacgcggcgcgcgtgagcctggagaaggaaaacgcgatcgtcaagcttgacgaagacgtcgcggacgaggtgctcgtgaaggccgtggaggccgagggcttcgaggccacgcccgcatagggggcgagaaatgcggaaggctccggggcctcgcgcggcagaaaaacctggcagtgccaacgctgggtggcaaaagggccgcgcgcgccaataatccctggcagtgccagaactgggtggcgaacgccagaaatctttggcagtgccaacgctgggtggcttcggagccttctgcgccaataatccctggcagtgccaacgctcagtggcaaaagggccacgcgcgccagaaatccctggcagtgccaactctggatggctccgaggcctcaccctcggggccgcccgcgcgaacccccctacgagagctcgtccatcgcgatgttggccagctcgtcggcgcggttgttgcccgcgttgttcgcatgccccttgaccttgtggaactcgatgtcggcgaacttctccttctcggcgagcagctcgagccagagctccttgttggccaccggctccttcttggagttcttccagtccttcttcatccacccgtaaatccagcttgtgatgccgttgagcacgtacgcgctgtcgacgtacacgtccaccccgacgtccttgttcttgatggcgcgcagaccctcgatggccgcggtcagctccatcttgttgttggtcgtgttgagctctcccccatgtaggtccttgacgtgctcgccccacaccaggtggacgccccatcccccgacgttcgtcctcccctggttgccgcggcatccgccatcgcaatagagctcgattcgcatatttctcctcactaccgataaaatgtgactgataaagtaccacaggacaactcagcacctgtattttcatgcggaaaggatcaggcatggccctgcactacgagaaggcgaagttcgagcgttcgtacggaacgacggcacagctgccaagacccgaaaaaccggaggtctcgtttgcgggccgctccaacgtcggcaagtcttcgctggtcaacaagctcttcaaccgcaaggcgctcgcgaaggtctccggcacgccgggcaagacctccaacatcaacttcttcgaggccgacggcgtctactttgtcgacctgcccggctacggctacgcgaagaagagccagagcgaacgccagcgctgggccgacatgatctttggctactacaatcaggagcgcagcttcaacctggtcatcgtactcgtcgacatccgcctggagatgcagaagctcgacaagcagatgatcgacttcctgcaggaaaaggagctcccgtttgtcatcgcgctcacaaaggccgacaagctctcgaagtccaagcagcacagctcggcgatgaagctcgctaaccagttcggcgtcgagcgcgaccagatgatcatcacctcgtcaaagaccggcgtcgggatggacgagctgaaaaagcgcatcgaggccgccgtcctgtaggcgcgcaaacccaaagccagcccgcagccagcccgcgaagccaatcccgctggcaaaggggctgcccccccttgccagcatcgcgaaagacccaaccccctcctcaggggcgcaaggcgtgacggcgctgcttgtcctcgtacatgcggctatccgcgatggcgagcagctccgtgttggagtagtcgccctccccgctccagacgtagccgaccgacacgtcgagcccgtgtctgtccaggtctgcacgcagccgcttgaccgcaagctcggcgttttcggcattcggcatgtccgacacgacgaggaactcgtcgccgccgagcctgaacacgctgttgaagtcgaagcacgaacccagcacctccgccgtcgacttgatgacctcgtcgccggcagaatgcccgtcgttgtcgttcgtgcgcttgagccggtcgacgtcgcagtacacgaagatgcgcttcttgcccttgtcgaggttgcggaaaaacgacgcaagcccccgtcggttgagcacgttggtgagcgggtcgcgcgtcgacagcgcctgaagcgcatccatcgcgtcgcggttgcgcagcagcgactcgacgaagtgagacagcatgagaagaatgctctccgccggtctcacgtccgtcgtccgcgaaaggtcgagtccgaacaccccgacgagttccccatcacgcctgagcggcgcaacgatcgcgctcgcgatgttgagctcgcgcagacgccgcttgagagacaccggcagctcgacctccgagacgcctcccgaatacgacaagacggcattcgcctcgaaggcgcctttccatttcgcgagcatccccggggggacctcgttcacccacacgtcaattgacgtaaggccctcacggcaccattcgtagctgttgtcgacatgccccgcagcatcttgttcgaggatgtacacatggtccgcctcaagcccacgtcccatcttctcgataagcttctcgatgccgacgcccgggtcgcgctccagcagggcaatcgagacggcatcgttcacgaacttctcgttgtgcagaagtcgcgagctttcctcgccagtcgaatacgaggccttgacctcgtttgcgatctcgaagcggtgcagcttgccgcgccaggggacgagcgtgtcccgaagcaggtaggtgccgcccgcaaaggggttgtggtactcccactcgagaaacgcgtcgtcggaaagacgcgcgttggtgcagaactcgcacggcgcagacctcccctgcaagacctcgtagcatttcctgcccagaagcgacgagtccttggagagcccgcactcttcgcggcctctctcgttgaggtacacgagcgagtagtcgtcgacatctgccatgtagacgacgctgctcatcgagtcgaacttgcggcgatcgaacatcagcaggtccttcgcgtgcatgtcgacctcggaaggacgctcgacgaggtcggtgaggcgaccctgcacgagcgcatagagctccatcgggttatccgcctcagagcccagcgcgactgcgcacagggcatgcagcgtgcacggcttgccccgtacctcatggatgtcgtttaccgcctcttccaggcgatgccccagatcctgcagcgctgcggccgaaagccccttcttgaatacgacgaactgcccgcccgcgaccctgccaagcgccccggactctttcacaatcgccctgaccctgtcagcgatggccctgagcagccggccgccaaaggtggggccatacgaggctgcgattctggcgtattccgggacgtcgaggagcagcaccgcgtagcgctggtcgtggtaacggtagttctccgcatactcgagcgccgtgatgacagagccgcgcacgttcatggcgttggtgaccggatcgacgaacagcgcggcacgcagactccgctcgcgggcggaggctcgctcggcatcgacgaagtatcccatgaggccgacaatcttgccgttgacgtcgtagacgggaatcttgttcgcaatgatgctgtgcacgacgcctttgatgatgcacttgccgggtgcgtccttgatgtgcttgccgtacttgatgacatcgagctcgtcttgcctgaacggcacctcgtcgatatgccagcccatgtcctcatccgtcttgccgagcacctcagcctcagagctcatgccccagtagtcgagaaacgccttgctcaccgcgacgaaacggcgctcggtatccttccagaacatgcacaggctggtctcgcgcatagtgcttgcccagacgtcatgaaacgtcgtcgcgttctcgccgaaggccatggcgtcgtactgtggggtattccggcacaaaatctctttgggaaaagcggggctgtcgtggacgacacccatgacctgcgtgccattcgacctgctcagcgtgagcaggcggtgcgtcttccactcgaacgcgcccgtaaccgggtcgtaggtccgaaacgcctcgctgaccatgccgcccggcgcgctcgccagccgctttgcaacggtgttggaatcggcgaacgcgaggtacgcctccctgtcatcggggtagatcatctgcgcggcgtaccgttgcacgagctgtgccagcccgtgctcgaactcctcctcgtccgaggcgaacgacccattgcgcgagatgacctcgaggctgtcggtatcgaggtgaaacacgccgatgaacgagcagaacagcgagaactcgcgcatgcgcgtgtcgatgcgcttgcggtggtcgagcgtgtcgtcgtagcgcgtcatgttctccagcaccacctggaacacgcgcgaaccctcgttgcgcgcgatgaaccgcgactcgagcctcaccaggttcggctcttcggcatgcaccgtcaccacctgctcgccttcggcccgttccgcctttgccgcggcagagcgcagcacgttcgacaaaagcgagcccttctggtttgctttcgcaagcgaggactcgaacgaaagcgacccgatgctctcgagctcgtccaagtacggctggttcacgaacagcggcctgatcgtgccctgcgcatccatggagaacagcgcgttcggccgctccgagaccaggtcgaccttgccgaccgtattccagaaagcgcgccagctccgaggctcgatcgtgtcggcatgggactcgatccactccgccgcgctgtcacgggcaagcggcctggaaaagtagaagccctgcagcttctcgcacccaatcgacctcaagaactcgacctgcatctcggtctcgacgccttctgccagcgtggagacgccgaggcgcttggccgccctgacgacggtggtgataagctcgcgggacttctcggaaaactcgctcaggaagcccatgtcgagcttgatctcgtcgaaatcggtgcctttcaagacgttgagcgaagagtatccgctcccgaagtcgtccatccacacctggtagcccgcccgatggaagcggtcgacggcggtcttcacctcgggtccgtactgcatgacggactcggtgatctctatgttgaggtagtcgcgtgggatgtcgcacgcgcgcacgacgcgctcgatttcctcgaagacgtcctctttcaggaagtcgagtcgcgacaggttgaccgagatgggaacgcaggacttgccctgcccaaaccactccatcgcctcttcgcacacgcgtttcacgatatagccgtcgagcttctggatgagctgcgcctcttcgagtgcgggcacgaacacgctcggcgggatgggaccgtacacggggtcgtcccagcgcgcaagcgcctcgaagccgcaggtctcgcctgtgagcgtgcgcacgatgggctggaagtgcggctggacccaccccttgtcgagggcgtcgccaagcgactgcctgacatagcgggcgagcatgtcctcgcgtcccatctcggcgttgtaacggacgaagcgcagctgtgcatcgtcgctgatcgactcgcaggccgtgcgtgcacggtcgcacgccgccgccacgtccccttcgtcttcgatgggggcatatccgcacttgagcgtggtcgcgatgttctcgccgacttcggagacgagctgtgctacctctccctcggcaagcttcgagcgaatctcgtcgaggtcgccgatgaccgtgaaatggtcgtcggagacatggcagaccgtacgtccggaatagcatctctcgaggccgcggcccacctgcttgagcagctcgttgcccgcctcgaagccgaatgccgcgttgtaggccttcatgcccttgatgtcgaagtacgcgagcgtgggcgtgccgccctgcgccaggatgcggcgtgcctcgaccccgccgaacgtcagcaggtaggacatgtcgggcagctcggtgaccgagctcgtgtacgtgctctctttctgcgcgttcacgtcctcgaagtagatgaccgcatacccggtgccatcgtcgaggtgctttatctgcccgcgggcgcgtacgacatggtacgtgtccgagccgaacagcttgcgccggtatatgacgtcgaggagaccgccgttttggcgaaactcgttgaccttgtcgataaaacgcggacggtcgacctcgtcgacctgcccgaaggccacgggcgtgcccaccactttcagatagtcgtctgccgtgctgcccgcgccgagcatcatctcggcgagggcattcgtggcggcgatgggcacgatctgcccgtcgattttctggtagatgacgtacgccgcgcttgcattggcaatgagcttcttgaagtcagcttgccagatcttgctctcgcgcgctttcacgcagaccatcccccccgcagacgaatacgagtctccagagttattcaagcacacgcacatccgaagtcaaatcgacgtccgtcattagagcggcagcgcgccccgcgaagggccggtgggcatacaggacaagcccgcgccctgacgagacgagcgttaagcccgcgatgccggtggttctctggtagggcttggacatgccgccgtcgatatcgatgacgcggcccgcgcatttgacgggatcctcgccgtccttaacctttacgggcacgtgtccgcagacgatgcgagagcgggaagggtccatcccgaactcctcgaatatgcccgcgacgacgtgctcgtccccgcacagggtgtagaacgggtttttgacctctttgcgcgcagccttgtcggcgacgaggtagatctcgaacgtggccatcttgctcttggcgaaaagcggcgagccctggccgagccacaggtaccataaaaggtcggccccacgtttgcgccctgcggcatcgtctgccgtgaaggcagaacgcacgtaggaatccaccaggtcgaacagcgccttgcccttgcaggtctgcccgaacagcgtgacctccttgagagtgccgtccgcgttgagcggcacgcacgcgtggaagacgaggaaatcgccgcagatcttgtagaggctccccttctcgatgaggacctgcatgtggcgctgaaggcgcgcgcagccggtgaaggcggctacgagctgctgcatgagcgcctcttcatctgcgctcagcgcatacgggtcggaccagtcgaccgtcgggaagacggggtcggtgatcgggtactcgacgccgtcgatttgcacggtgccatgcgcgcggtcgatggtgtggagcagcttgcggtcggaaagcccgaacgaggaatactcgtcgatggtctgcgcctcgaccttgaactgcaggatcgccatggccttctggattttgaccgtcgtggcaagctccccgggagaaagctcgggatgctcgcccttgagcgcgtagcccacgcacgggtcgtccccataggcgctcgttgcgaagtcgcgcaggggcgtgaggtcgatgccgtaggcatcctccagaaccgacaggttggcatagcgcgcgcagttgcgcacgacatgcgcgatgcagccacgctgcccgagggcggcgcccatccagacaacgtcgtggttgccccactggatgtcgacgttgtcggaggcggcgagctcgtccatgatgagctcgggcgcgggcccgcggtcgtagatgtcgcccgccagatgcaccctgtccacggcgaggcgctggattgcctcgcaggtctcgacgatgccggcgtcgccgcggacctgagcagcggcatcgcgcgcgaagctgcggcacagccacgcgagctgctcggcatacgatgcgccgccatcgccaagcagccgcgacttctcctgcgggtagtagacgagcgtggcgagctcggcgcgctcggacgcgctgagcgtatcggagaactgcgcgtctatgcgcgcgcggatcgccccgcaggcgctcctcacgatatgcgagaactcctcgtactcgccgtgcgggtcggagatgaacagctcgggtgctgcgctcatgggtggtgtccttttctctcgttcgccctcgtgatgccgccgtatgcgcctcctgcggcagtcgggcgccttggcggatttgtgcgtatgcgactactatacccgcaatcatacccgcaatccgcgcacgaaagccgtgcagcattctggcaagtcgcatacaatagctgcctgcatctacgagccggtatcgaataaggagcttgcgtggcctcgatcgaacttgagggcgtggaaaacgtccgtgacctgggcgggattcccaccgcagacggacggcacgtcaagcgcggccttatctaccgcggcagtgcgctgtaccacgcgaccgacgccgacaaggacctgctgttccgccagctcggcatcgagtgcgtcatcgacctgcgcaccggctgggagcgcgcggccaagcccgaccccgtccccgagaaggtcgagtacctgcgcatcccctacttcgaccaggagacgctcggcgtagactactgcaagcccatcgcggggacgatcgtgatcggcaacgactttgcctgcgacccgcacgacttctacacctcgatggccaaccccatcaccatcgaccagatgcgcaagagcgtggactccgtcttctcgcgcgccgcgcacggcaagccggtctacgagcactgctcgggcggcaaagaccgcgcgggcgtcacggcgtttctgctgctcacggtgctcggcgtgagctacgaggaggccatgagggactacctgctcaccaacgtctcgcgcgagcgccacatcggccacatctaccagcgcttcttgcgtctgacgcaaggcgacgaggactacgcccagctcattaccgaggctcacagcgcgaggacgcaaaacgtcgacgcgtttctggcggaggtgcaccgccgctacgggagtacggacgacttcatccgcaaccagctgcgcatcagcgatgtcgcgcgcgagcagttccaggcgcagtgcctcgagtagacgcgcccgcttgaggctcgggcgcgccttcacccgggacgtctcgcctacagcgcctcgatactctccatgacctgctccatgaactcgtccgacaggtagaacggaaccttcttcagcgccttgggcgtggagtacgccgccttgccctcgccctggtagacgagagcgcgcacgcaccagctcgcgctgtgcagcgccgtcgtgacgaagaacgcgcggaagcgatcctcgaagccaccgggctcgaacctgccgtcgacggcgcgccagtagtcgtcgaggaaccccgcgatcttggaacccgggaagaagtagtcgctgtcccagacggtcgtcgtgggcgacacgaagtaggcgacatcctgcgcgacctcgccgatgatggggcgctcccagtcgacgaaatgcccgggggtatccgtgaacctgcccgagtgcgagcgcgtaagggcagcggctgcctgctgcgcgctttgcacggggatgaggaaatgcgaggcgagacattccgagttgacgatgtgcgtgcggtccgccgcgggacacggcgcgtcgagcagcccttccgagaccttgatgagacgttgcatccacctcgtgacgcgcgcgtcctcgtaggcggagccgtagtagaactcgaagcgcgcgacgctctcgtcgaaccaggtgcgcagcgggtcgtccggcacgaacagcggcgtgtcctcggcaacgggcaccgcatggaaatcagccatgagctgggctgcgcattgcaggtcgccggggcgcaggtggtcgaagtcgagctcgtcgccatcgcagaagctctccacgagcacgccgttttcgggcgcgccttcggaactgtcgacgaacagcggcaccggggtgcagccgctttgctcgagagccttgagggcagcatgctcgtaggccacctggtcgtcgtggaacggctgcttgacgaggttcacgcgcagcacgtagcgttccccggtcgccgggttggaaaaccagtagttctcgttgtgctccccgcgcccgagggcgtgcggcacgagctcggctccc

SEQ ID NO: 4550 - DNA, 6765 bp, Unknown
  16S sequences of unknown bacteria
gcttttattttacatttacattttttctgttcctgtctatagcctttgtgccgaacaaggagtataataatggcacgaatttaggggaatatagatgttgcggaaatggagaaaaaagaatgcactacggaccaatccaaaaaggacaattccttcggcggctcaatcgcttttccgcttgggtgcgcatcgacggcaccgaggaattgtgccatgtgaaaaataccggtcgtttgggtgaattgcttttgccagaggccgtggtttatttggagcacagcaacaaaagcgagcgtaagacgcgatgggatctgattgccgtggagagtggagggcaaatcgtgaatatcgattcgcaggcccccaaccgggtgttcggagcatttgcagcatctggcgcctttcggccggatctggagtatatccggccggagtttacctacggtgattctcgttttgattttcgtttagaatgccatggcgccgtccagtttgtggaggtgaaaggggtcaccttgcttcgggatggccgtgcgctgtttcccgatgcgcccacagagcgcgggatcaagcatctgcgtgggctgatgcgcgctgtgcaggaaggatatgaggcggccgccgtgttcgtgatccagatgaaacaggcgcaggccctttccccaaatgacgagacccaaagcgcgtttggccaggctttgcgtgaggcggcgcgggccggggtggcgctgtatgcctatgattgccaagtaacaccggatcatctcagtatcgatgcgccggttccgatcgaactttgagaggcgatccccaggaggagtgaaacgatatgaaagttgggatgatttttgaaggcggcgcctgccgctcggcgtttacggcaggcgtaacggaagcctttttggaacaccacattcaaggagattatctgattggcgtcagcgccggtgcctgttacatggtgtcttacgccagcgcccagaggggacgcaaccgggagctggtgctccgctatattcccgatgcacgctatatgggagccaaatatctggctcagcgcagcaaccggagctattttaatctggacttcatctacgaccagattccgaatgtccttctgccctttgattacgacgcctttgctgcctttcctggcgaagtggtggccgtggtgaccaatatggaaacgggcaaaccggaataccttccgctgccccggaaggaccgccgctccacgctcctgcgagccacctgcgcgctgcccttcctgtttccgccgatctcttacggcggaaagcgctatatggatggcggtattaccgatccgatccccgtggcccatgccctggaggccggttgcgataaggtggtggtgatcttgacgcaggaccgccgctatatcaaatcgccggagcctgcgctggaagtgggaaagtggcgctatcggcatgatcggaatttcgttcgggcgctggacgagcgtaccatgcgctacaatggcgccctggcccgggtgaaacggtatgaggaggaaggcagggcctttgttatagcgccaaagaattccagacggtaccgccgattagagcgggatccgaaagtactggagcagtggtttctggatggttatcatgaggctttggagcatatggaagcactgaggagctttttagaagaggatgggggatatggagcttccgctgtatcagtgggggattgaagaggcttctgcgctgctgcgtatatgagcatttggaaatacaaaaggcaaggcgtatttcaaatttttttgaaatacgccttgcctttttatggtgacaatgatacaatctaattcaagaaattttgaaatagataaaagcaggtgtgcgtatgggattggcggaatcctttaaggcgctggcagacccgcaacggcgggaaattttgctcttgttgaggcaaggctgctgtacggcaggcaagctttccgagcggttgaaaatctcaccctctgcactgtcttaccatttgaaaacgctgaaaaaggcggatatggtaacggaatacaaggaaaaaaatttcgtctattatgaattgaacacatcgctgtttgacgaaataatgctgtggtttcaggcgttttgcggggaggaaaaaatatgagcaaaaaagagcgtgtgctgtcgtggattttgctggtgctgtgcgctgcaccgattctgacggcggttgtgggcgtgcagttcctgcccgatcaaatcccggtgcactacaatgctgccggagaaattgaccgttggggcagcaaatatgaagagctggtcttgggcgtgtgtttttcgctgagcggttggatcttgtggctggtttcccgtttcagcggggcatttgcagacacggaaaccgagcgggttcaggcacaggccaacgcgcacattgtgcgtgttataggtattgcagtgcagctgtttctaaccgtgctggaagtcgtgatgctgattggagcggcgcaggaggcggctgcaggagctgtagtatcttccataccattttataaaatcatgggtattggctgtgggatattgtttctggtgctgggaaatatcatgccgaagacaaaaccaaatccgattatgggcgtccgtctgccatggttggaggatcatccagaggcgtggcgcaaaagccagcgggcaggagggatcgcctttgctgcagcgggcgccctatgccttgtgctgtccctttttctgcagggggccgcattgttttgggttattatgatttgtgcgctcggcgcagcggtggtatcatgcatcgtatctctgcgctttagccgtgcacaatgacagcagcgcgccgggcggttttcctgtccggcgcgctgtttttggatcgcctatagaagtttggcccaatcgatctgaccgatgggatgcactggttcgggcgcagatgtgtgcgcaccgatcatcttttccatccagatcatatcgtaccagcggccgaatttgtaaccacacttatgaaaggttcccactgggtgataccccagatgggcgtgaaagtcagcgctgtgattgtccagatattcatctgcatgagcggtgtaagcaatgcaggcgttcagattcagaatattctgcgccgtaagcaggcgttccaaaatatcgtaaagcgcttttccgtatccgcggccagaatatgcttcctggatgtaaatggaggtttccaccgcccaatcgtaagcagcgcgttctttgaaaggagaagcgtaagcgtagccaacggctttcccgccgcaaagcgcgatcaaaaagggatagcgctgcagcgtgcggagaatgcgggcggcgaattcttcaatactgggtactttatattcaaatgtgatggcagtgtgttccacataggggcgatagatatccaacagggcaggggcatcctctgcggcagccatgcggatggtaagtgcgtcattcatcaatgggtcggacctttctgttcatatggtattgaaaagtattacaatttataatggagaaggaagcgccgcgcgccacagggcagttagcttttccagcgaataagcggcattggccgggctggtggaagggagcacggtgcagctgcggcccagattcggttcgatgtatttgcggtacagccggccggcggtgccgccattgacataaatcccctcgattttggcggtattcagaatagggtgcaggtcgtttgggagcacgtttttgatgctgctatcgctggaagcaatgatgtcacaactgtggatcacatcccacaaagcaatgtggtgacgcagaagaaggttgcgcttttcttcaatggtaacagggagcgtttcgccagtgagtgctgccataacgcgccagaagcggttttggggatggtgataaaagaaatggccttcccgggattttacagagggaaaggaaccgaggataaggattctggaatccgcccgataaagcgcgggaatggggtgttcgatatgccggtattgattttctggggcgctttttttctgcaaggccggccgctggatttgcgcggatgccatttcttccgccagatgccggcaaatacggcccgtaaggccccaaatcgggtggtcgccgtacagatagatcggcacatccatttttccagcctgccagggatatccggtttcgtatccaagaaggtgatatgggaaatcctccgggatgtgaggctccaggtcatagctatacagaataggcttatgtttgaggaaaaaagagaaaggaaccaaaaaggtgtccttcacttctgcggtatttacccgcatatggcgcagcgcgcctgcgtcgacctctgccagtatggggtggattagagttccggattggtgatagagaaaatccaactctgccaacaaatggacagcatcggggggaatcgacagttcttcttccatttctcgcagagcacaggtagtgggggtttctccggcctctatgcggccgccgggaaaacacacctcgccaggctggcggttcagggtatcggcgcgcacttcaaacagcagatgcgctgcgccgcggcgccggacgagggggaccagtacggcataggcgctgcctgcgcccagcagtcccggcacatggccgttaaaatgagtttgaaaatcttcgatacgcatggtgaggcctcgctttcagtgatcgacattatatagtatacccaaaaagaatcggaacaaaaaggttcctgtttattgattatgagggaagaagggtcggtttcttgtggttgtgcagaagaaatcttcagcaggcaaccaccgtatacagtagctgcctgctgtgtttgaagatattgattgccaacataaaaatttccccattcccgcccttgcggatgcagttaatatccggtaattacaattttaggtgacgatacttttgtacacgatcggagtataacagttcttgaggagtcgaacctcacacctgctcttcagtgtaccacgaatgcaacttgcgctgttgctgcgtgatattcaccctgcatctgctgtccgtagtgtattcctattattctatcaaatccgtattccagttgctttgctgcagctgattatccaacagacgcaattctttggacatctgatcaatttctgcctgccaatccgctacagagattgtggactttattttaatttctgtatttctggcccggtaggttgtttggctggcggtggaagcaatttctttataaagacggatttttagggacagcgcatcttttcttgcaatcagtgctgtcagggtccggccttccacaatcgttgtgcaatttgtctgattgatttgagcaatcaaggcggccagccgcagaatggcggaatccagttcgtctttcaacttttccggatcttcagcggtctgttcgccttcctgcactaatacattgttgctcaggcgatcctgcagctgctcgatctttcgattgagatctgccctttcctgcagagcttcggcaagcttcattccatatccctccgattcggatgtagagctgtctgataaactcattttactacaggggttcaaactctgcaataggcatttcggaggaagcggatggctgttattgggcaggacagagcgaaaaaggggcggaaaatcttgctttttttcagtgcagaacctataataacattactatagctattttaggttccgcagtccattcagatgcggatgaaaaaaggagattttgcatatgacgcccatcgccgaagagagtttggcattccacgcgcaaaagcgtggtaagatcgaagtgatttccaccgtaaaagtcaacgatgcccatgacttgtcggtggcttacacccccggcgttgctcagccttgtctggagattcagaaagatgtggatcaatcctatgagctgacccgccgctggaatatggctgctgtgatcacggacggcaccgctgtgctgggcctgggcgacatcgggccggaggctggtatgccggtgatggaggggaaatgcgtgctctttaaagagttcggcggcgtggacgcatttccgctttgtatcaaaagcaaggacgtagacgaaattgtgcgtacagtttacctcatttccggcagtttcggcgctatcaatctggaggatatttccgcgccccgctgctttgaaatcgaagccagactcaaggagctgtgcgacatccctgtatttcacgatgaccagcacggtacggcggtgattgccctggcgggcatgaccaacgccctcaaggtggtgggcaaaaagcgcgaagaagtcaaagtagttatcaacggcgccggcgcggcgggtatgtccgtgtgccggttgctgctgcgggcgggcttttctgacattacgctgtgcgataagagcggcattatctgccaagggtacaccgatgggatgaactcctatatggtggaaatggccaaagtaaccaaccgcgcacaccggagaggtaccttggcagatgctctggtgggagccgacgcgttcctgggcttctctgcgccaggcatcgtgacgacggaaatggtgaaaaccatgaatcgtgacgcaatcatttttgcctgcgctaaccctacgccggaaatttttccggacgacgctcgcgccggcggcgcacgggtcatttccacgggccgcagcgactatcccaaccagatcaacaacgttctggcgtttcccggaattttccgcggcgcgctggatgtgcgcgcctctcaaatc

SEQ ID NO: 4551 - DNA, 14681 bp, Unknown
  16S sequences of unknown bacteria
gccaaagagccggtacgtccgcaccgccagctccgccggcagaccgttgacgcacaaatattcgaccaggcggcggatgccggattgcttctggaacgcgctggagagctgggcagcctttttggccgtaatgcccgtgatctgcgtcagctgctccggctccttttccaggacctccagcgcccgctccccaaagagctggacgatccggtgtgctgtcttgaccccgacgcccttgagggcgccggaggcaagatacgcctcgatctcccgtcgggtctcgggcatcaggcgctccagaaactcggcctcaaactggcggccataggtattgtggctgacccagtggccggtgatgagcagccgctcgccgacgaccggcatggggatcatcccgaccacattggtcaattcgccgtcctcgcactgcagccgcagcacgcaatagccgttctccgcgttataaaacaccactgcgttcacggtcccccgcagcagctcctgttgctgtcgcattctctctgccccaatctatcgttctcatgcgggaaaaagcttcccaaagcaagatctcatccgccaacccctgccgctgcagcgcatccagcagcggctgctgcgccgggagcaggtcatctgccacgatgaccgtccttgcccggagcaggcccatctgccgcagccaacggcagcagcgcagctgctgctccagccgcccggcatctagctgcttcggggccaacacaaaataacccgccagcggcatcggaaacagcagcttccgtttgcaccattgcaaaaaaccaacaagcgccgcagcaagcagcacgcagcaggcgatcttccagcccattgcatcaccccgctgcatcctatgcggcagcaggccgcgctgctatcactttactgcatttgcagccaaaaagcaaaccccatttgctgcgccgcaggcggaggcgcgctatggccccggcagaacggcttgcccctgctgcaaagcctgcaaaaaccgctggtccgccgggcaaaagtccgcaaggcacgcctccgccgggtgcagccagcgcagcgcatggtgctccagagcccggggtgtctgccccgccagacaggcgggcaggaaggtcaggtggaccgtcacgtccggatacgcgtagaccgtatcccaaagcgcggccccaggctgtaccgtgattgccaactcctcccgcagctcccgcgccagggcctgggccagggtctcgcccgcctccagcttgccgccgggaaattcccagcacagccccctcgccttatgcgccgggcgctggcaggccaaaaaggccccatcctcccggtataaaacccctgcgacaacctccagcatctgcgcaccgtcctctccgcagcctggtttctggccaggcgctttttctttcattataaaaggccgcaggcagcctgtcaacgcacggtataaccggcccggcctgggcatacgttcaaaccaggagggatgcgccatgttttcctatgccagcgccatggccgcgctgcgttccctgcagcgccgctacgcttttattgcctgccgccccatcggcacaacggaatacggccgggagctcacccacgtccgcatcggctgcggccgccgccgggtccttctgacggcggcgcatcatgccaatgagtggatcacagcgctggtgctgctggcattcttggaggactacgccgccgcattcgccgccgggcagccgctctggggcatcccgacccgcatgctgtaccgggaggtcacgctttccgtcgtcccgctggtcaatcccgacggggtggaccttgtcaccggcgcagtctgtccggcctcccggcagtacagccgcgcccgggctattgctgctgcgttcccgcagaccccgttcccgtccggctggaaggccaacgcctgcggcgtcgatctcaacctgaattatcctgcgggctttgcccaggcggtgcagatcaagcgcgccctgggctttgaccgccccgcgccgtgcaattggccgggccgcaccccgctggaccagcgggagaccgccgccctggccgcgctgacggagaagctcagcccccattgcaccgtggccctccacacccagggccaggagatctattggcgctatggcgattatgcagacccggcagcccaagccctgggggagcaaatggcagacgccagcggctattccctgacgcaccccgcccccggcagtgccaacgccggcttcaaggattggttcatcgcccgctttgcccgccccggctttaccgtcgaggcagggctgggccaaaatcccctgccgctgacgcagctgccggagatctatcaccaagtgctgccggttttatgcctggccatgacaggtggataaacaaatgactgccccggcaggccggttttgactggcctgccggggcagcatattgcttcagcaatagaaatctttgattttctttgcgcggctggggtgccgcagcttgcggatggccttattctcgatctggcggatccgctctctcgtcacgccaaagatctggccaacctcttccagcgtatgagtacggccgtcgtacatgccaaagcgcatccggagcacatccgcctcccggtccgtcagcgtccccaatatttcggacagggcctcggagagcagcgtgttggacgtggcatcggcggggccgggggtgttatcatcctcgacgaaggagccgatggtcgtatcctcttcatcgccaacgggcatgtccagggagatggtatccgccgcggtccggttggcctcgatgatcttctcaatgggcagattcagctccgccgcaatctcctccaaggtcggctcacggcccagctcctggaccagcttgcggttgcagcgggtcgccttgttgatgacctctaccatatgcaccggcacgcggatcgttctggcttggtcggccagtgcccgggtgatggcctggcggatccaccaggtggcatatgtagagaatttgtttccctttgtatagtcaaacttgtccaccgcgcggatgaggccggtgttgccctcctgaataagatccagaatatgcagaccccgcccggagtatttcttcgcaatggaaacgaccaggcgcaggttggcctcggtcagcttgtccttggctttcttatccccttcggcgatgcgtttggccagctcgatctcttcgtccgccgtcagaagcttgacctggccgatctccttcaggtacatccggaccgggtcgtccagattgtactctgcggccagctccaccgggtcaaccagcggttcctcttccgtctgggagagatcgatgtcatctgttaaacggtcctcaatatccaattccgcttcattgcccagcagctggatgcccatggattcaagcatttcataaatctgttcaattttctctacagaaagatccagcttttccagttctgcggtcaattcggtgatcggcagtgtcccgtccttgcggccgcgggcaatgagtgcctgcagcggcacgcgaatttcgtcgttcatcttgttgtttttctttgtggcagccattttgcacacccttgttccagcattatgcgcaaaaatactgaatttgcgcatctgatttattatatacccgtttttcccccttggcaatacttttttcgtaattttttgtatcttcctgtcctcccgcaaaacttagggcgagggagccccggttttagggctcagaacgcccaagtgccgtcgcggaaaatgggaacgacccggccgtcttctgtgtgggcgtcaatggaaaggtcggcagagccgatcatgaaatcctcgtggatcatggaatcgttgacgcccatggcgcggcactcggccagcgtatgctgctcgtaatcgcggatggtatcggcaaagcccatccccagagccagatggcaggcagcattttcatcaaaaagggtgttataaaacagcagcccgctctggcggatcggcgagtcatagggcaccagggcacattcgcccagatacgccgcgccttcgtccatgccgaccagcgttcgcagcagctcctcatttttctccgcatgcagctcgacgaccttgccgccggcaaaccgaagccagaagccctcgatcagctgcccctggtaggacagaggcatcgtggcatggacaattccctctgcttcgccgcgcttaggggagataaagcactcctcggtagggatatttgcattgaagaaaatgcccttgcgatccgtatcgctgccgcccttaaactccgcctccgggatcatgccgacacgcaggtccgtcccgttgctgctatggtattccagcgtgcgaatcttcagggcgttgaggtaatcacagcggcggtgcaggtcgtcattatgcgcctgccaagccgtcagcggatcatccgttacacggctagccgccagaatcgcctcccacagggcctcaacagcctgggccttagagcgctccgggaacagctttttcgcccaggcgacacctggcactgcggcgatgcaccactggtagtaattttccatcttatcccgatagggcttgatgatcgcattgcgcttctggatcgccttggcctgcttggcatggttgacgcccttaagcccgtccggatcctccgagaggagataaatacggcagggcaggcggtcaacatagtgctgcagcttggcctcctcccaggcttcgaccgtcgacagagtcttttccgactggtagcgcacatggagcttctgcagcttttggtgcgcccattctaccgcgaccttcccggccccggcgcggtagcactcctcgaccagcattgtgacaaactccggctggtccagctccgcctggattacgacctcctggcccttttgaatattgacgccggtgcgggcgatcagcttggcatagctgcgcagtaccgtttttttcatagcgatttcctttctgccagcagctttggcgcggcattttgataattgatatattgataggtgacgccgttctcctcctgcagcggcgagcgctctaccacagaccactggggcagcgcgtcaaggtccgggaagaaccggtccgccgggggggagagaaacgttttcgtcacataggccatgctgcaataatccagcagcgccgcataaacactggcgccgccgatgacgcacaggctgccgtccggcagcgcccgggccgcctgcagcagcgccggaagatccgagaacacccgggcgccgggcacttgaaatgccgggtcccgggagaggataaaattctcccgccctggcagcggcctgccgccagggaacgtcgccagggtgcggcggcccaggattaccgtcttgccgatggtcagctggcgaaagcgccggagatcccccggcagggagaccagcagctgattttcccggccgatgccccaatcctgcgtcacattgacgaccaggctcatgccatttttctgctccatctccgcaacctcagatcgccacaggaatcttttcgtcaaatgggcacggattatagccgtcaaagtggaagctgtcaacggtaaacgcatagaaatccgtcaccgccgggtccatccggaattggggcgcggagcgcgcttcgttctggagcatcgtctccaccagcgggatatgccggtcatagatatggcagtcggcgataacatgcaccagctccccggcctgcaggccggagacctgggccatcatatgcaccagggcggcatactggacgacattccagttattggccgtcagcatatcctgggagcgctggttgaggatcgcattgagtcggttgccggagacgttgaatgtcatagaataggcgcaggggtacaggcccatctcatgcagatctgcaaagttatagatattcgtaaggatccggcggctggccgggttgtgcttcaggtcatagagcacccggtcgacctggtcaaattcgccctccgggtactggtgcttgacgcccagctgatagccataggctttcccgatggtgccgttttcatccgcccaggcgtcccaaatatggctgcccaggtcggcaatgcggttggatttcttctgccaaatccacaaaagctccccgatgcaggatttccaatacgtccgccgcagcgtcatgattggaaactcctcctgcaggtcataccggttgaccacaccaaatttcttgatcgtatgggcaggcgtgccgtcatcccaatgggggcgcacctgcaaatcggtatcccagacgccatggtccagaatttcccggcaagtcgcgcggtaaatctcgtctgctttactcataaggcaggcctcctttttcgtcatttcttttatcataacaaaaaaacacccggcaggcaagcagaaaagcccacatcccccccagattctgacatggccgctatctgattttccagatagcggccatgcgttgtaggcaattgttaggccaggccgtttttgacctggaggatctccgccaggatggcgatagcaatctccggcggggtctcgccgcccaggtctaggccgatgggcgtatggaccgcagccagctgggcctctgtaacaccctgctcccgcagcatggtaaacagagcctccatttttctccggctgcccagcatcccgacatacgccgcctgctttgtcagcgccgccttgagggcgatgccgtcatcggcatggctgtgcccgcagatgacgaaatatgccccagccgggacatctgctgcgcagatatcctgcgcaaaatccgtaacccggataaagcggtcggccaacgccgcggattccggcaccgcctctgccggacggtcgtcaaagagcaggacgtcaaagcccgtctgctttgccacgcggatcaggcaccggcccacatgaccgccgccgacaacgaccagcagtggattggcccgatagacctcgatcaggacggacagcttgccgccgcactgcatcccatcgtccgccgtctccgcaccgacattataatgatgcagcacattgcagccgcgtttgatctgggccacggcatccttcgtcacctgcagctccgccgcaccgccgccaacggtacccaacgtcgtgccatcggcatagacgatcattttcccgttggtccggggcgtactgcccagggcttcagcgattgtcgccacagcgaaatcccgcccggcctgccgggcctccagctgcgcctgcagcaaatcctcagtatacatgcatgaatcctccgttctctccggcgccgccggattctgacagggccgctatccggtgaatcagatagcggccctgcgcgaatacttttacttttttaccagatgcaaggaagccagcttacttgtctgcctcaatatactgcatcatcagctgggcgacctgctcgcgtgttgcggtgttgcgcggctgcaggtacgtcgtgccgtcgtttgtcttgctgccggccaggatattctctgccacggcccaggacatcgcgtcctttgcatagctgctgacagaatctgcatccgggaaagccgtcagatctgcacgggctgccgtgtcgcggcccttgacccctgcgtaacggtacaggatcgctgcgatctgctcccgcgtcagattgccgttcggatcaaacttatcttccgtcacgccgtagacgattccgttctctgccgcccatgcgaccgcatccgcgtaccacatgttctctgccacatcggtgaagctggcggctgccttaacggcgggcttgccctcctgccggtagagaatgctgaccagcatcgcgcgggtcgtgttcgccttcggggcaatcgtcgttgcggacgtgccgtagagcaggctgttctgcagcgcataatccagcgcattgtgcgaccaataggtcaccgcgggcatatccgcgaagtcagcactggggcagccaaaggccgggatcttctcgccggtcttgatcgttgcgccgcagtttgtgcagaccacgtcgccggtgtagccgtctgtcgtgcaggtcgccaggactgcgtttcgcagctccgtcgtctcatgcttgcagggggccgcgtgggtcaccgtgaccgttgcgatcttgctgaccaggcgcttgccgccgacgttctttgcttcgtactgggcctcgctaatcccatagccgaagcggatgttcccggtgttttccgcctttgcggcaacgctggccaggtcgcccgtgccagtcgcccagctcaaagccagggcagcggggacttccgttgcaccatcggcggtgcaataatacttgtaggtgcccatgtcctcatagctgaggtcagaggcaaaacccgttgcgtctgccgcagagacggtatcacctgctgcgaagtccacaccggcgtcttccagcagattctcgatggtaacgtattccgtcgctgccatcgtctgttcaacatcgctgcccgtcttccagaactgatagccgatggtaccttccgtctttaaggcgtccagatccgcgaccttgtagctcttgacggtgacggcatcgctgccttccgtcttttccaaaacagacaagactgtgcgggccggatggacaaccgtgatggctgtgacgccgctgatgagacgtttgccatggatggtaccgtactgctcctcactgatcccgtaggcaaagcgcaggttgccggaacggtaagctgtcttcgcgacctcttccgcggaaccggagccactgttccaagacagcagaattgctgcaggcacttctttcgcttcctttgtctcgtcatcaatataatacttataggtattgccgtcggcaaacgtcatccccgctgttgtgccgtcgccggacgatgcagtcaaagtatcgccatcagcaaaatccaaaccagcatctgccagcaaatctgcaatcgtcacatactcattcgcagcgactgtcttttcctctccgcttgtcatactccagaattggtaaccaactacccccttctttgccagcgcatccaagtcgctggcagtgtaggtcttcgtggaaaccacattctcatcctcatactgctcatagacagtcagaacaacaggctccgccggaacaacactgccatgctggaacatcgggttgccaatggcagctataagtcccagcacatagtcgccgtcggtttcacctgtaccgccacagcatccgctgtccaccccttccggcgtcatccaaactttatagactggatagccgttatcgtccacttcaccggactcttcatatttggcaaagagcgttttattgtccagatcatagggataaacgtcaaatttgcttcggctgaagctgtcctccgcacatgcggtatcaacgaccagatttgcattggtatcgtacagggatactgaggacgtcgccgtgatattctggcccaagtagagatacgtcaaagcctggcaggactcaaacgtattggcaggcagcttggtaatctgcacttcatcaggaataataaccttgtacaggttcttccagcacttgtagaacacgcctgtacccatggttttgaggctcttcggcaaggtcacagactttagactaatcccgtagccgaaggcggcatctccgatggtttcaatagaatcaggcatctgcaaatcacacaaagcaaagttgtcaaagaacataaacgcgccgattgtcttgcagccatccgcaaagacaaccttggtaatgttttcattgttacagaaggccccggtaccaatcgttgttaccgtggcaggaatggtaacctccgtcaggcccgcatcaaaatagaacgcgtaggcgccgatattttcgaccttgttgaggttcacctttgtcaagccagtatggccaaagcagctgtcgccaatggtcttcagagaatctgggcaggagatttcctttaggttttcgcagctccagaacatataatcacttagcgttgtgactccctcagggattgtcactttagtgagctttttgcaaatatcaaatgcgcagctgccgaaggtagccccgacaggtaaggtgacctcggtcagattgctctggcggaaggcaagattctcaatcattttgacagaatccgggaatgtaacggtttccagaacgcttttgccctgataggattgcataaacgcctggcaaccgatcacctcgacaccggcaggaatatcatagtgggtggcagctcttgcattggggtagcgaatcagcttcttgccgttctttgtaaagagaacgccatcaatatccttaaagttggggttttcctccacaacgaaaatgtttttcagcgcatcgcagcaggcaaagacgttctccgtgtaggtcagcgtctccttatcgtcgccgtcaccgacttcgatggagctctcagctcccattttttccaaggttgccggcagccggatggtttcaacactcttacagctgtagaaggcggattcgccgatggtatggagctttgtcgcagaaaaatccaactccttaacccgctctaagccacggcagccttccttggcgatatacgctaaactctttgggaagctgacactggtgaaccagtaattggaggagctgctggacgtctcatactgcatcattgcgcccgcgccgatgccagtgaccgtgaaggtccagtccttctcagcaacctttgtcgtgacagtttcgggaatgtccaacgcaccgcttccgttgtagccaacgcgcttcacctcgaccgtgcctgtcttggtagcattttcgaaatcagtcacatgatacgtgatgtacttagggctctcggactctgccgtagtaccctcgacatagatgttaaaatcaggaatagaggcgacttccggatccgcgttcccatcgccgaccaaggtgatatcccccgcatagtccttcgctgcagttaacattgcagaccaagtggtagtatacttttgcagggagccggcgggaaccgacagaatcaattccttgcagcctgcaaaggggtaaaggatcttgttgtataggttgacataggttgccatcacagggggctctgcgctctggaaattgaccttacgcagcgcggtgcaatcctgaaaacaagtcggtccaacttccgtcacggtagcgggcagagagatttccgtcaagcttgtggattttgccagtaagctagtgggcagggtgctctgtttgctaggcagggtcacagaggtcagatttgggttggcagccaatgcagccttaccgaaggtaacgttttctgccgcaaagaccaacttttccagcttccacgttccagtactgtagcgaccgacatagttaaaggcatagtcctcaaccgttgtaacagaggctgggacggtaatgcccgtgatggtttcagctacttctgtcggagtctggccttcatgatcacccccgccattatagccgcagaatgccttgctatgaatgccaacaacattgtgggttttaccgtcgccatcggtatatgttgcggggatggtaatatcaccgccagggccggtgtagccaagtaaccatgctgtaccgtcttcccgcacctcaaaattaaagaatttcgggtcgttattgtcgatggtagcgccgcaggcacaggtcgaaccgacaaatttatgcggttcattggtaatggtgtatccgcaacccgcatcggtacagaccgcgctgtgggtaccgtcgccgttatcggtatacttcaggttgtggctggggtatgccgggtcggccaagtcgtctgagatgtctgcttcgacagtaacatagccgtcgagttcattcataaaggcttcctcatccttcaccttacaatgaaccgtaaacggtcccaggtcgctgtactctgcgatactgctcaaattagatggcacgccgtagaaatacagatccgtcatactgtagcagccttcaaactcgtagtctccaagtaccttgaccgtgcttggcacaacaacagtggtaacttcactgtaagtgaatatatcatccagtgctttcactgttataccgtcgatggcagccggaatgataatatctgtatcgttgccggtgtattgcttaatcgttccggtcctggcgttgaattcaaagtcactcgccgccgtcggggtcttcggcgtctccgtcgtcggggctgcgcccagggcaggcagcgcaaggctgaccagcatggacaggcacagaatcaggcccaacatgcgccgcaaggggtttttgtgcgttttcatgtgcgttcttcctttcaaaatatgtattattcttttcagaatataaccggctttattttaaatcatgaataacgtaaagtcaagcgtttcccaaaaatcatccctcgcttttccggctgtaaaaaaagcttgcttttcgccggcaacttgtgtatcatacaagaggttatacttttttatagacaacggagattttcagttatgaccaggacaagattcctctgcgtagcgctctgctgcgctttgcttttctgcctgtttaccgggtgcaacagcggcaagacctatgacccgctggaaggcgtcgaaacgaccgagtttaccgacagcgccgggcgcacggtgacaattcccaagaacatcacccgcatcgccgccagcggctcgacttcccagatgatcctgatgaccgtcgcgccggagctgctcatcggcctggccagcagccccagcacagaccagatgccctatttcccggagaatatgtggtacctgccgaccttcggccagttctatggcaacaaggcaaacctcaacatggaagccttgatcgacgcccagccgcagctcatcatcgacctgggcgatacgaaagagacgattgccgacgatatgaacggcatccaaaagcagacgggcatcccgacaatctacatcaacgccaccatggagacgatgcccgaagcctaccggacccttggccaactgctggaccggcaggaggccgctgaggcctgcgccgtgttcgtcgaaaaaacgctgcagatggccgaggaaaaccgcgcaaagctccccgagagtaaccgaaaatccgtcctcttcggcaccggctccaccggtcttgcctgcaacgcggagggctctgttcagtccgccgtgctgcctatggtcggcacggagaacgccgtcaagacagacgaaatttccaaccggggcggcggcacgacgattgacatggagcaggcctatgtctgtgacccggacgtcatcattctcgccgccggcggcccctatgacaccctggagaccagcgaatggaatgccctgcgggctgtgcagaacggcgcatactatgaaattcccaacctgccctatgactggatggccgctcctccgtccgtcaaccaggtgctgggcgtctggtggctgggcaatctgctctaccctgagctttatgattacgacatggtctgcgtagcccaggagttttacaagaccttctggcactacgacctgagcgagacggaggcccagcagatgttggcccgctccacgctgaaaacaggaggcagccaatgagactgcgaaaacgtctggccacgctggtgctgctggccgcgctgctggctgcgttgaccgtccccatccaggctgccggtcaggttacagatacgctgacggtcaaggtcggctactacggcatgggcccggagacgtatgtcgaggtcgggacgtaccattggagcgagctttccgccaacctgccaatctcagatcgtgcctactcctttttccggattgatcccgacgaaaactatcagaccgtcattgattccgcccggggcttttccatcggtgatctgctggattacgcaggcatctataccggcgatgttacctcgatacagttttacaccaaggaccagagcgtcggcaccttcacctccttcaccgcacaggatctctttacctcgaaccggtactatttcaacgatctggccgcccacatcaagccggtttacgatgagaacggcaactttgtcaaatacgacgggacggaggcctggtcggactaccaaaccgtccagccgatgctggccctggaggacaactgggctaccttcgagattggcacagaacacaccgcaccgaatttctcctccctcggcaccggcaaccgattccggctgctcttcggtcaagtcgatcccctggagactcggacgagccaaagtgcaaaatatgtccatacggttctggtgacgctgaatggcgctccagaaattaaagatgaactgccggagatcgacggcaccatcggctcccataccctgacgtttaatgtcaatgtcgacaaccagacgctgctgcaggcgctgggcagcctgctgaatatcgcctcgtcggactcctccgtgctggagatcacgggcatcaccgtcacccccagcagtcagtatagcgacgtggcctcggtcagcgtcaactacacggtacatacggcgggcaccgctaatctcaacatcggctacgccgggggagagatcataaaaccgcagacgatcacgaccggcgacccggagccgacgccagataacccggatgacccgaacaagccggatgacccggcaaatccggacgatcctgccaagccgaatcccgataccgggccgaacggcgg

SEQ ID NO: 4552 - DNA, 2817 bp, Unknown
  16S sequences of unknown bacteria
cagttttgaggcggttttgaaagacggcttgtccgtctttcaaaattcacgacccaatgtcgtgaaagcctcaaaactgtctggtctgaaatttttttcagacttttgccttctgctcgcgtatatccttgccatagaacaagaacgcctgatactctccgaaaaggcggctcgttatacggtcgttgtaccgctcgcgtatctccttctcacggaggttagtattgatcatcgtggagcgcgaattattcagtctcgtgttgatcacgttatacaggcacgacaccgtgaactgattcgttatctccgcgccgaggtcgtctattatcagcaaatcgcagtcaaaataccgctccgtcttcgactccgacgagtcattatagctccgtccgaaccgctcgaactcaaagtctgacaggatattctgcgccgtgtcatagacaacgtcgaaccccttctcgatcacgacctttgcgatcgaagtcgacatatgcgtcttcccgagcccggtcgtcccgacgaacagcagattcctgcctttttcgccatcattgccgaagttcccggcaaacgcgcggcaagacgagagcacatgctccatatacctgaactgctccggcgtctggcggtaataaccgaggtcgaacgtctcaaagctctgcgtccttatcagctgtccgatacccgagctctcgtatcccgcgaggatcagctcgcgcttcatgcagtcgcacatcttagcgccgacgaacccggtgtccgagcacttggggcactcatacttcaccgacgaataatccgccggatacccgtgctcgacgaggaactgcccgcgtatgcgcctcagttcggcgttctcgctcttcagctttgcgatccgctcgtcaagccctgccgagcccttcatcgactcggcgaatatcctgagccccgtctcggacagaaccctgtccatcgcggcgacatccgggaacttcgcgtgcagctccgcggcgcgctcctccgcggcttttttcgcgcggagattcttgtcggcgaactcctcgcgtatgcgtatgtaatttgcgcggttatatgccatctgaacctccactcttcacgtcagcccttcgcggcgggtatgtcctccggattaccggctccgcggtagctgcgtctcagcgccgcctcgaagaactcgtccgtctggaacccggattcggcgccgttcacagtctcggtgccatgcgccgcctccgccttcttctttttgtagttctcgagagacgcctcgacagcctcgagcgtcgtcagcccggaattcttccagttctcgagcaccttattcatatatgacaccgacgggtcgccgatcttgtcgaccgtgacctcataggcgcgggttatgacgtcgatcgggaagcaccactcgtcgagccagcaggtgaagcacttcttctcctttgcggtgagctccctctgtccggcgccgataagcgagcggatcttaccgacgttgtcctcgaactcgtccttgcgctttatgtacgcgttaagagcgtcgaccgtgtcgacaccctcgtcgaagaggttcaccgcggtgcgctcgatatatctgagcgaattcttgcccttcccgctgagatacgagaaaagcgtcactatatactccccgccaagaccgagatgatcatacatcgtcacgatcaccgcgatatccgccggagtgaatatcttgccgacgatctgctggcacattgccgtcacatccgcgagatccggggacgcgcttattatgtccgcgcactgactctcggtataggtcgggagagcggacggcatcaggggctttcccttgccgccgcgtaccgtctccggcttcggttccggctttgtcttcgcgctgtcgggctccgcgggaacaactttcgcggtcaggtcagcctgcggagccttctcatccgccgcgccggcgagagatatgacgcccgcggcggaccaaaactcgatatccttatcaaaagccgtcccggttatatcgagcctcgccgtgatctcagcgcgcgccttgtcatagtcgcctcttaacccctcatcagacgcaagaagcagaagcacacgcatcttttccatgtccgccccgctcatagcctcaagcagcctgtccttcggcagcgccacgaccgactgaccgtactcgagtctgacctcactcattggtcatatcctcgctgtcctcttcctttttcgtgagctcataacaaagcgtcatcagagaatcgcccatgtggacgttttgtacgacgaccgacgggtcgtccagctcaatctcggtgctggcgaagttccagagtcccttgacgccgagcgccgcgagtctctccgccgtctccttgacatattccttcggcatcgtcagcaccgcgatgcttatcgagttctccgcgaggtaatcctcgagcgagtccatcggcagcactgtgtatccgttaatatttttcccgatgacatccgggcttgtgtcgaaaagggcctcgagattcacgccgcgcttgacaaaaatcgggctcgaggcgagcgcgctgccgaggtttcccgcccctatgattattgccccgtaattctgcgtgacaccgaggatgtcgctgatctttccgtagaggtatttgacattgtacccatacccctgctgtccgaagcccccgaagcagttgagatcctgccttatctgcgacgcggtgacgtgcatgagcctcgacagctcaccggaggagatccggagtatatcgtttttcagcagctcgcgcagatatcggaagtatctcggcagccgcttta

SEQ ID NO: 4553 - DNA, 32759 bp, Unknown
  16S sequences of unknown bacteria
tcgtcaactacgccccctgtgaactcgctgtataaaaagcgagtgttcttacagcttttcaaatgctgtaagaacactcgccatggagcaggcaacgggaatcgaacccgcctccgcggcttgggaagccgctattctaccgatgaactatgcctgcatttatttttgaatgcttatacattttaccgtgaaatgagccggcagtcaagaccttttgcagtaaaatatgccggtaccgcttgacaaaatttcgcagggggctatgataggtacatcactacgcaaatatcggaggaaaccattatgtcaattcgggaagtgaaagcattctttgccgcgcggggcatggaagataaggtgctggagttcgcaacctccagcgcgacggtggagttggctgcacagacggtgggcgttattcctgcccgcattgccaagacgctttcttttatgacagcggagggaccgctgctggtggtaacggctggggacgccaaaatagataatcacaaatacaaggagacctttagctgcaaagccaagatgctgaccccggaggaagctgtggagcttgttggccacgcagtgggcggggtgtgcccctttgcggtaaaaccgggggtgaaaacctgcctggatgtttcattgcaacggtttactacggtattcccggcgtgcggcagcagcaatagtgcaattgaactgacctgcgaggagctgtatgaactttccgaggcgctggcctgggtggatgtgtgcaagggctggcaagatgctgaataaaaacataaagagaacgacccgtcacagcatgtgctgcggcgggccgctttttgttattcaacatccagttctgggggaacatcaatctcatccgagacatatttgccgtttttcttgcgctggcgtacacactcagtcagcagatattcgatctgcccattaactgagcgaaagtcatcctctgcccaggccgcaatggcagcgtacagcttgggggaaaggcgcagcggcacctgttttttctggttctcgttcataatcagtataggctgccggaattgactacaggctgagcatcgtgattgccgcacagcaccaccaaaagattgctgaccatggcggctttgcgttcctcatccaattctatcacaccgctttcggaaagacgcgccaacgccatttccaccatgcctactgcgccgtctacgatcatcttgcgggcatcaatgatggcggacgcctgctggcgctgcagcatgacggctgcgatctcggtagcgtaggccaggtaggtgatgcgggcttcgatgatctcaataccggcttccgccacccgctgctggatctcatcgcggatgcgggcggcaacgatctcgctggagccgcgcaggctgccgtcatcggcaacgccgtcgccggtggtatctacattgggagcaacatcgtaggggtacagacgcacgatattgcgcagggcgctatcgcactgcagggaaaggtattctttgtagttatccacattaaaaacagccttggcggtatcgataatgcgccaagtgacagcaatgccgatttccacgggatttcccaggcagtcattgatcttctggcgattattgctgagggtcatgatcttgagcgagagctttttgccggtggtgtctacttcaatggaggtggtgttatcgccggtggtggcctttacacccagtgttttgacatcgccgctctggctcagccgtgtcttggcagcaggattgacgccggtacagaaggggttgacatagtagtagccttcacctttcagggtgccatagtagtggccgaacagggtaagcactaaggcttcctgcggcttgaggattttaagccccatcatgggaatccagataaagcaaagaataacgatgccgggaagaatgagggcaattatattgcgcatggctccgatgacgaccataacgatggctgcggccataagcagcaggaagaatataagcatagccatgccgtgctttttattggtgaggattttttctgtcattgaagtcactccttatagatgatatctttatgatatcactttgaactgaaatgtcaagaagaaaaatgaaaaagtccccgatcaggggactttggagggggcgaagaagggagagagggtctcggcacggggtgggggtgtaagcaaggtcgcaataagagtggccggtaccgagacaagcagcgccatttgaatgtgatagatgcccaaaggattcccgagggcattccacacaacgaaagtaatagaagaggtgaccatggaggtgatggcaccagccttattgaaccgccgccagtatagtcctaggaagaatacccaggcaaaggatagccccagggcaccccaggcggggtacatcaggaaggcaaggtattcgggaggattaagcccccaaaatacacagataccgccgataatagcaacagtggcacgggcaatggagacacggcgacgctccgaaagccccagtcgaaaggtcttggtgaggatatcgttttccacagtggaggcacactggatcagcagggaatccacagtagacataacggcggccgatagcccggccagtgcgatacctgccagtaagggtggcagcagagattggatcatgtagtagaccacattatcggcggtatcaatttccgggaaaataatgcgcccgtacagtcccagcagaacaatgcaaatttccagcacgaccacgatggaaacggtgatggtaaagccctgccggaaagcacgccggttgcggatggagtagaagccgcggatatagttgggaccgcccagcgccccgaaaaaggtgagcagaatgaaggccaccaggaaagagggggtaatgggggagttggcatccggccaggagataaagccgtgggggaagatctgctgatactgcagctgcggggatggcccaactcggtggaccgaggcggtcagcaggatgataacgcccagcaggatcaaaatgccctgggcaacatcggtgtaaacaacggcatagtaaccgccgaaggaaacatacaggaacacaataatgccgaagcagatcacggcggcattgtaggaaagcccggtggtgacattaaaaagaatgccgatggcagcgaactgagtaaccagcagcgggacggaaaaggtaatgataagcagcgaagcaatgagacgggcggtacggctttcaaagcgtttttccagaaaatccgggacagtgaaaagattgagatcacgggagcaggtacagagtttgcgccccagcagccaccagcatagaaaggtcgctacagtgacggcgctggcggcatagataaagtaaatgccccactgccaggcctggctgacccagccgaccagggccccggcgctgaccaaactggtggtatatacaattccggcaaagaagccgttgacctgacggccggccacatagtagtcagcagtattttttgtgcgttgctcccccagaatgcccagagcgaacatcccgacgaagtaaacaagtatgacagcctgtacaatgtaattcatagtgcgggttcctttccgtcataaaccgccggccgattcagatacggcggcgaaccaaaagcatggcaatgaatacagcagcctggatggcaatggcaatccaccagccaattggcatgacgctcccctcccttgatggaaaactacctttattttcactttttccggggcttttgtcaatagcacaaaatccccacatgtgtggggactttgcactaatattgagggggtcaaacaccatttgaatgatgaggagattacttggcttttaccttggccgggaagaacttttcgagcgtttcggctgaggtgggcttggtggcgtaggtcacgatgagagtgacgatgatcagcgagataaggccgatctggatgggagcaaagcctaggggagaccaaccggtagcggaaccaatgaggaacatgccggcaccagccaccataccggcgcagacaccgggagcattgagacgcttccagtacaggccgccatagaaacacagcgcgaaggagagacccagaataccccaggcgggatacatcagaagggccagcatttcggggggattgaggccccaaacgatggaaatggcgccgatgacgagcacagtgatgcgtgcaacggtcatgcgttgcttttcactgaggttcttattgaaggtacggaccagaatatcattttccacagtggaggcgcacatcagcaacagaccatccatggtagacatcatagcggctgccagcgctgccagcaccagaccgcccaggacaggaggcagcagactgtcgatcatcataaatacggtctgatccggggaggccagatcggggaacagaaccttgccgcacaggccgatgacgatgatgcagacttcgataacacagacgatactcataatcatggtaaagccgcgtttctgctctttcgggcctttcagggagtagaagcccttgatatagttgggggcgcccagtgcaccaaagaagttgttcatcagtacagcgataaaggctgtggatgtaagcgcgctgccggtggtgggccagctgacggcaccaatgggattggcggcggcgtaggcttcgcccaggttgccgcctactgcgatgagagcagtgatgaccagcgcagcgatgccgaacagcattaggccgccctgaacagcatcggtgtaaaccacggcaaagtatccgccaaaggcaacatagacgaatacgatgacgccaaacagcactacagctgccttgtaatcaatgccggtgaccatattgagcagcaggccagcggctttgaactgagaaaccatgagcggtacggtgaagatgagcaggatgagtccggcgatcaggcgggcggtgcggctttcaaagcgggcttccaggaagtccggaacagtcagcagatccagctttttggaaaggcgcatgaccttgccggaaagcagccgccagcagatgtaggtggcgatggtaacggcacatcccgcaaagatgaaccatacgccgtagctggaggcctgaccggtccagcccaccagggcaccggcgctgactagactggacatatacaccagtgcggtgataacgccgcccaatccacggcctgctacatagtagtcagtaacagttttcgatttccgattggcaatcagtccgatgatgaacatcgcgacgaaataggcaatcagaataatgagaatcgtccatttcatttttcattacctcttcttttcttcgtctttgttttgatagtggggatgcttaatcatcctccgtgatcttgtttcttccgatcagcataagaacaaaaacgagggcctgtattcctactgcgatccaaaatccggctggcataacaaaacctccttttacaaaagcccccttatatggggatattcagacgagccagaatgtctgtatttatgattatagcgggaaagaaggtaataaaaaatgttcacttttgtgcagttgatactctttcttggcaaatagaatgagaatatcaggcagattgacaagagaaactggcggatttagcacaatgggtgttcatttcttaccgcagaggagagaaaatagtgaaaaaggttggatttattaggaaaaacggcatttttgacaagattagtggattctttgcaatttaccgcaaaggatattataataaacagaaagaacaaagcccacaggactggcggaggacagcgatggaagaaggaaatgcaaaatctttggtaagaaggctgccgataaaaaaccgcattacgctgatggtgattctgatatcggtggtcccaattctcattatcagcattttttcctatgccaaggcctttatttcggtccggcagacggtgcgagcctttgcggcgcagacgctgacttcgttggaacggtcccttacaaacttggcggatccttcgaggctgttggccggaggacaggaaaaacttccggaagaggtgctgaaaacagaacctaccgggctattccagcaggaggcactgcgctatttgaccggggtgacggtgctgtatacagatggaacggtgtgcagcctcgccggggaagagatactggcggttacgggatctggtggatgggcgataacacaaaatgaggtgggagagcaacgattggctgtggcatggtatgcgacagacggggagggaaacgcttatacggtgcaagctttgtttatgcctcagatgtttacccgcttgctggatgtttataatgaggagagctgtaaccgcctggtgctggtggatggggccggtggcctgttgaccgatgacggaacaccgctgacggtgctggaaggggaagtgattcgacagacagcatttgaggtaagcggggaaccgatttgcccccgggaggagcgcagcagctttttgtgctaccttacggtgccggcattggaggctaccctagtctttatagagccctacaccgagatgatgaagccactgcaaagtatcttctttgggacactgtttggaacgattctactgctgaatttttcggtgattgtgattgattccatcgaccggccgatgaatgcactggtgaagtcctttggcgacgcggcgcgggtgaactttgcggttacgcaatctgatgaaagccgggatgagctgggtattttgaatcaggcttttaatgagatctgtgcggaaatgcgagaggccctgaataaggtggaaaaggaacaggcggagaaacgccgggcagagatccggatgctgcaggcgcagatcaacccgcacttcctattcaatacactggatagcctgcgctttacctccatgatgaataatgtaccggtcgtttccgatgggttggcagcgctttctcatttgctacgcagctctatcctaaaggataattcctacacaccactgcacagtgaactgcaaacagtggaggattatttgactttgcagcggatccgctgctgcgagaccattgtgctgaagacggagatcagcgaggaagctgcaaaggccagtgtgatgcgcctgctactgcagcccattgtggaaaatgcggtcatccacgggataaaagagaatgtccccctcaccatccggttgaaagcatgggtgggggaggagacactgtatatcagcatcatcgatgacggcaagggatttgaccaagaaaaagctggcgaggatggtgtgccaaaaagcagcaagatgagtggcatcggcctgcacaatgtaaaggaccgcttgtacctgtcctataaggatagacaaagtttttccattggcagtgtacagggccagggaaccgaagtgcagatgacgatgccctataccgagtggaaggaggagagcgatgtataaggccattctggtggatgatgagaagattgtccggctggcgttgaagaccattgtggattggactgcgctgggctataccgtgaccggcagttacagcagtgtcaagacggctctgctggagatagaggatgatccgccggatctcatcattaccgatatcaaaatgccggatatggatggtttgcagtttatccagcaggtacggcagcaaaaccgggaatgtgagattattgtacttaccaaccacgaaaatttctcctacgcggtggaggcaattcgcctgggggtgatggactatgtggtgaaaaccgatatctcaccggaatccctgtctacactgctgcaaaaagccgcagaacgattggctggaaaaaaaggcgcagagccggtgccggtcacccctatgacggaagatgattttcgtgaaatgcagcgggtggcgcagggtgcgcaggtggaggagattcgcttttcggagccctatgcgatttgtctggcctttctggatcgcccggagaacgaaaataagcggaatgattctggattctataacctattgtgtgaaaagctggggcgaccggcttccacattgattcggttgggtccagatcagacagcaattgtgctgatgccaggtgagcaggaggcattcaaacgggaggccccaacattttgtcaaagaatcagcggtttttgccgggcctacttgaaccggccgtgcggttttctgctctcggagcaatttgcagatagcgggggctttttgcaggagctggagcgctgccggaatgcgattccctatgtggtgtttcacgggacaggccgtctgacccgtgcggcaacgctgcggcggctttcctcggaggaggtgccggtgcaggtggtatgccggcagctgagtgatctgctggaggcgaaagactataccggcgcacaggagctattttcaacttttgggcgagggaaggagttgcgagcgacagcacccggtccggcagcccatgccatgagcagcttaggcctaacagcgttgctgggttgctcggcctacctgggcgaggaggagcgcagagccttgtgggagcagatgataaaatgtcgcagcgtggatgactacgaggcgcattttggccaggtgctccagcagatggagcgctttgagaggaaaaaagccgcattgctgtgcaaaaaggaaatggcgcagattatacagtatatcgaagaaaacctttcccagcacatttccttggaaatgataagcgaaacggtgcatatgaccgaaaactatgtcagcaggctttttaagagcgagagcggcatgaatgtggtgggctacatcaatatggaaaaaatggaacaggcccgcaggctactctcccgaccggaaagcacagtgcgtatggcggcaggggagttgggttactatgaatctagttatttcattaaactgttccgcaaaacatacggcgttggccctggggagtataaaaagtttgccgaagaccgacaggcggccccgctactgaaaacagaggaataaaaaagagcggagtccggtgagggcttcgctcttttggcgtattgtggttcttgttcagtttaggtaatagagtcttccatcaggccaaatccagcgacctcactaacgggcagtgagaataggatagcgccggcttcgctatcaggaccggcatgatgcagcaccgattgcataatggcagccttacggtcgttctgtgccaccatcagaatcacttccttttcggcggcgatggacacattgtagaactttttattctggctgccggtgcctttcccgtgcagcaccgtgccgccggtggcgcctgccgcgcgggcggcgttcatcacctggtcggtgcggccctcattggccacgatgacgatcagctcatagcgattgctcaattcgggggtgtagcgggcgggctgctgctcgccgttattcagatatgccaaggtttttcctcctcccacgcttttgatggggacagccatgatgatgccgtgtcccgggatgccgatatacacctgccggcgcatttccttaatgaatttgcgggttttttcggggttcgccaccgtcatgatgacacgcttttcggtggactcgatgccgagaagatccagcatgctttgtacggcggtgccgtgccccagcagggtgacggtctggggcaggtcaagggccgcggcgatctcacacacacggtccatggcgccgggattgacaaccgagatcaggtaattcatgcggcgttcacctcccacagctcaatgatttcatcatctccatactgctcgcgggcaatctcaggctcagtgcggcggctgtaaataaagccgaccatctgaatggagattaggggcatcatggcaaccatagcaacgacgccgaatgcatcgatgagcggattgccgcccacaacggtggaggcaccgatcataaattgtaacataaaggtggctgtcatggggccggaggccacaccgccggagtcaaacgcaatggcggtgtaaagatcggggacgaagaaggaaagccccaaagcgacgacatagccaggaatgaggaaccacatgatagagatgccggtaagtacccgcagcatggaaaagcccatggccaacgcaatggcaatggaaaggctagttttgatggcgctgccgggaatagtgccggcgctgacctcctcgatttgagcctccagtactgccacggcgggttccgccgaaatgataaaccagcccagcagcatcgaaagggggattagcagccagcgggtccagccggtggcaagcccggcgcccagtacctcgcccagggtggagaacccaacattaacgccagtcaggaacagtactagtcctacatatgtatacaggataccaatgacgattttggccagattacggcgaggcatatgcaaggtaaggaattggaatgcgaagaagatgactacgatgggcagcagtgcgattgccatttctcccatgtatttgggcaggtcatgcaggtaggcagccccaatggcggaagtattggcgaaggaggaagtggtgatctccaaagcgccgctgctttcggtatagaagaagctgaggatcagtacagctagaataggtccgatggagcagagcgccaccagaccaaagctgtcagcttctgcccgggcgtcacttcgaatataggatacaccgacgcctagtgccagtatgaaaggaacagtcatagggccggtggttacgccgccggaatcaaacgctacactaaggaaatctggtgcggcaaagctggccaagataaacactacaccgtaaaaagcaataagcagccagtgcagctttacgccggtaacgatgcgcagcatgcatacggaaaggaaaaatccaacgccgatgccaacggtgaccaacagtatggtgttattgatgtggggtactgtctcggccagaacctgcagatctggctccgctatggtaacagcaaagcccagcataaagctgacgatcaggatcaacggtaggttacgagttttggtcagcgccataccgatgcggtttccgatgggtgtcatggaggcttccgcgcccagcgagaacagtcccatgccaacgacaacaaaaatagtgccaatcaaaaagcagagtaacaaatcggtgccaacaggggcaatggtcaggcatagcaccagaactatcacgacgataggaagtaccgaaatagccgattcccgtattttctcgatgatctttactcgatttgcggtcagtactgcggtgtctttgtgcttcagcgcactcactcccttccttcttcagtggggcacagtttaatattatgcggaaaaagagcggctccgcactttactatactaaatatatcatacagagggtgctttggcaaactgctgggggggaagttttacaaaaaattaacgatgctgcaaaattcagtttgtgttgttatactattgggttgttagcgctcatatgaatatctatgaggatgatatagccggatcagcaaactgcgatgcgttaattcttggatactccataatgtaaaaagtatccattcgcaggcggggaaaatttagtatcattgtgtagtatagcgggaatgatatgacgaaaatgaatgaagaagttgcgcaacttgcaattttaacaagttatttgcgcaactggcaatggaaagcaaaaaataatggagtctgaaaggcagagacccgcaaaaagggcctctgccgtttattttgtttattttcacccatgcataagattccataccacaaaaagtataaattgtccgcaagtattccctttactttattcataagttgttatacaattatattcaataagtaatataaaattaaaagggggttacaaaagttgccgcaggataccataatagaggtactaaggaccgaagaaaaaatgaatcaaatacgagagcaaaccgccgcggattgtagacaaaaactgctgatggcacagcgcagcgcggatcgcctgcgggagcaggcccgggctgatgcggaggctgaggtgcgtgagatgatgtccgaggcggaacggcaggcggcgcaggctacctatcatgcgctggaggaagcctccgtgcaatgggaacataaaaaagaggaagccaggcagcgcatcccgcaggctgccaggtggatcgtggaaaaggttgtggaacgctaatggctattgttgctatgcgtcacttgcggctcatagggctgcaaagtgagcgggaggaaatgctgcggcgtttgcagcatcttggctgtctggaaatcaccgagccggagccggcggcagatgaccctctgttggaaaagctgcgtataccggaggcagcggagctgcaaaggatacgagagcagtacaccgcagcagagcaggcgctgcaaatattgacagatcacactccaaaggaaaagaatgcactggagccgcttccgttcattgatgagcaggcattgactgatgaaagccagctggctgacggaaaaaatgcggcggagcggctgaaccgctgccgagaggaattggcttccctgcagtcacgcagcgaaaagctggcggcagaggaggctcagcttcttccttgggagagcttcaccatgccgctggaatgcgctaccactgaaaaagtgctgattcaaatgggcacactgcccgccgcagtgctgccgcagcaaatacatgagacactggatgcggccggagatctgtatgagctgcgggaggtaagtgctgaccgggagcaccgctacatggtgcttacagtgcacatttcccaggcggaagaccacatagccgcgttgaaggcattgggctggagtcgtgtgacattgggtgaacggactggaactgctgctgccaacttgtctgctctgcggcaggaacaaacggcactggcggaaaagagagcattgctggaagaagcaattatccagtgcgccgggcaaaaaccggagctgcggcagctttcggatgcttcccgcattgaaatggaacggggagaggcaaaaggacgcacgagggagactgctgaaaccttccttttggaagggtggttcccggcggagaacaccaaggaactggagatgcttctggagggctgtacctgcgcatggcagatgacagacccgctgccggaggattatccgcatgttccggtcaagctgaagaacaaccgctttaccggtccgctgaatatggtcacggagatgtattcgctgcctgcctatggctcgctggatcctaatccctacatggcaccattctttattctgttttacggcattatgatggcggatatgggttatggccttttgatgatgctggcatcactcattgtgctgaagaagaaacagcctaccggcggcagctacaatttctttgcgctgctgggattatgcggcatctctactttctttatgggtgcattgaccggcggctttttcggagattttatcccgcaaatgctcaaagtcattaacccggaaagcaccttcacctggttctggcagccgcttttctctcccatcaatgatatcatcatggtaatgctggggtcgctcgccttgggctgtgtgcagattcttgtcggtatggtcatcggctttatctacaagctgaagcacggcgagatagccagtgccctgtgcgaggaagctgcctggtgggttattattggctgtggtgtggcattgggcatcaccgggaaaaagacattcctatgggtgttgttggcggtcttgattattagccagggttatggcaaaaaaggcttcggcggaaaaattgttggcatcggtggttcggtatacaatcacattaccggctattttggggatattctctcctatgttcgcctaatggctttgatgttggcaggtgcggtcatcgcgcaagtatttaatactctggcagctatccctggcaatctgattgtatttattattgtatcgctgttgggcaatgctcttaattttgccttgaatttgctgggctgttatgtccatgacatgcggcttcagtgtttggaatttttcaagtacttctaccgggatggcggacgcgcgtttaagcccgttgcggctcagcccaaatattacagaatagcagaacaataaaaaggagcgtatgaaaaatgagttttctggaatctttcggtggtttggcgctggccctgctgggcggcggtttggcggctggtttgagttgtgttggctcggccaagggaaccggtatggcaggtgaagccgctgccggcctgatgtgcgaagatcccggcaagtttggtaaagcaatgattttgcaggtgctgcccggtacgcagggtctgtatggtaccgtcgtgtggtttttctccatttatgccattggccttttgaatggcaataccgacttgagcgtgatggaaggcttgcgctgctttgcggcctgcttgcctatggcgttgggcggattgctttctgctattgcgcaggggcgtgtagcggcttcctccatcaatattctggccaagaagccatccgactggtccaagggtctggtactgtgcggcattgtggagttttatgcaattctttcgctgctggcttcgatgctgatgctgtacttcctgttcctggcgtaagcaaaacgggagaaaggagcccttatggaaggaatcgaaaagatcaccgcgcgcatcattgaggatgccgagcgggagattgcccaaatgcagcgggaaaatgaagaaaagatcaatgccttgacggcggaagctcaggcggtggcggagcaggagagcctggaactcctgacccgcggacgccgtgcggcggaggaacggcgggagcgcctgtcatcttcggcggcggtggagtgtcgcaagatggaattggcagctaaacaggaattattgaatgaagcttttgcggcggcggtggaagagttatgccatttaccccgagaaaaatatcttgcgctgatcgcttcactagctgcggaagtggccgaaggaggggagaagatgattctttccccgcaggatgcaagtgaaattggaccagaggttgtactgctggcgaataccgccttacgcgaagcaggtaaaccgggaaagctgaccctcagtgccgagccccgttctattccgggcggatttatcctcagccacggtgatgtagagctgaactgtgcctttgataccctggtgcggctgcagcgggaaaagctggagaaagaggtcgctgcgatcctctttcccgtacagtaaggaggggctgcgatgacccccatcaaggatactgactatttggcggtctctgcgtggctgcatgcaatggagacccgcctgctgactccggaaaaggtggagcgtctactggaagcagccagtgagacggaagcccgtaagctgctgacggaatgcggttatgccgaagctctcccactggaggaagcgctgcgggagcatcgggaaacgctctacaaagagctggcggctgctgtgccggagccaaggctcattgagctattccagctcaaatacgattaccataacatcaaggcgatcctaaaggcagaacgccgaggaatttcgccggaagcatttctgctgccaggcggtcggtatgatgccgctcagctgcaaagcgaatggcagcaggagcatatgttccaggtaagtgatacagcccgccgtgcggcgcaggaagcagcagctcttctgcgggaaaatgatccgcaaggtgctgatctacggttggatgctgcttgttatgatgaaatgcgcactttggctgaggaaatgaaaagcaactttttacaggggtatgtgcggcagcttattgacgccgcaaacctgcgcaccgccgtacgggccgcccgcagcggcagcagtgaggtactgccccgtgcccttttggagggcggcagcgtttccccccacggcataatgatgacagagcctggaaagctgggcgagctgtttggtgcgggggcgctggaaaaggcggcagctttgggcgccgcggcagcggggagcggttcgcttaccgcctttgaaaaagcctgtgacgaagcaaccgatgcttatctggcggcagcccgccgtacccccttcggggaggaaacggtgctgtgctatcttgccgccgtggaaaatgagatcacagccattcgcattataatgaccggccggcaggcggggctttcgcccgaaatgatccgcagccggttaagaaacgcaggataaaggaggcgccctatgtataaaattgccgtgctgggcgatgcccagagcgtacagggctttgcggcgcttggcttgcaggtatgcccggccgaaaacgccgagcaggcccgtcccatcctgcaccggctggccaaggaggatacagccattatctatgtgacggagcagctggcagcgggtctgaccgcagagctggaccgttaccgcaaagcagttacccctgccattatcctcatccccggtaaagagggaagcctcggactggggatgcagcaggtgaaaaccacggtggagcgtgctgtcggcgccgacatcatttgaggaaaggaagaaagccccatgggaaaaatcgttaaagtctccgggccgctggtggttgccactggcttggaggaagccaatatggcggatgtggttcgggtaggggagcagcgcctcatcggcgagatcctgaccatgaacagtggctccgcctctatccaggtctacgaggaaacctcgggtcttggacccggtgcggaggtagttactaccggttcacccctttcggtggagctgggcccaggcctggtagaaaatatctatgatggaattcagcgcccgctggatgccattatgaagaaggtgggtggcaataatctcccccgcggggtggaagtgccggccctggaccgtgaaagaaaatgggagtttaccgccaccgcccatcccggggatgaagtcatcggtggtgatattattggtactgtgcaggagaccccctccattttgcataagattatgattccacccaagatgaagggaaagctggtttcgataaaatccggcagctataccgtgacagaaacggtcgctgtgctggagcagtcggacggtacccgtgtggaattgccgatgatgcagaagtggccagtgcgtgtgggccgtccctatcggcgcaaattcccacccagcgtgccattgcagtccggccagcgtattgtggataccttcttcccggtggcaaagggcggtaccgcggctattccgggaccgttcggctctggcaagacggtaatgcagcatgccttggccaagtggtctgatgtggatttggtggtctacattggctgcggggaacgcgggaatgaaatgaccgatgtgctgcgggaattcccagagctaattgacccccgtaccggtgaatcgctgatgaagcgtaccgtgctcattgccaatacctccgatatgcctgtggccgcccgtgaagcgtccatctatactggcattaccatagcggaatattaccgtgacatgggctatgctgtggccgttattgcggattccacttctcgttgggcagaggcgctgcgtgagatgagcggtcgcttggaggaaatgcccggtgaagagggctatcccgcctacctttcctctcgtctggcgcagttctatgagcgtgccggttcggtggcctgcatcggcagcgatgaggaacgccgcggctcgctgaccgcagtcggtgcggtatcgccccccggcggtgacctttccgaaccggtttcgcaggcaacgatgcgaattgttaaggtgttctgggcgctggatgcaagccttgcctatcggcggcacttcccggccattaactggctcaattcctattcgctttatatcgacagcctgcggccgtggtatgagcagaacttcggtaaggctttcctgcagaaccgggaatgggctatgtccattctgcaggaggaggctagcctcaatgagatcgttcagcttgtcggcaaggattccctttccgccaaggatcaaatcaccctggaaacagctcgcatggtgcgggaagatttcctgcaacagaactccttcgtcgatattgactccttctcggagtatgaccggcaggcaagaatgctttccatgatccgccggtatgatgcactctgccggggagctgccgagcgcggctgccgtgttgccgagctatttatgaccccatcacgcgaaaagctgggtcgtgccaagagcgtcccctccgatcgctatgcggaggaatatgatctcctcttgactcagatggaggaagaactggaagcattggcgcagaaaggagaggaagcactgtgatccgtgaatataaaacgatacgggaaatctccggcccgctgatggtggttgaccatgtacagggcgtcacctatgatgaactggcggagatcgagttgaccgatggctctctgcgccgttgcaaggtgctggaggttaacggtgataccgccgtggtgcagctgtttgaagcttctgccggtatcaatctggcaggttccaagatccgctttttgggtcacccgctgcagcttgctgtttccggtgatatgctgggacgagtatttaacggcatgggtcagccgattgatgacggtcccgctattttggcggacgagtaccgagatatcaacggtcttgccatgaatcctgcagcacgcaattatcccaatgaatttatccagaccggtatttcaaccattgacggtctgaatacgctggtcagaggacagaagctgccgatcttctccggctccggtttgccgcatgcacagctcgctgcacagatcgcacgtcaggcgcgggtgttggacggggaaagcaactttgcagttgtatttgctgcgatcggcatcacctatgaggaatccgaattctttgtcaatgagttccgccgcaccggcgccattgaccgcaccgtgttgttcaccaatctggcaaatgaccctgcagtcgagcgtatcgccacgccgcgcatggcactcaccgctgccgaatatcttgcctttgatctcggaatgcatgtgctggtcattctcaccgatatcaccaactatgccgaggcactgcgggaaatctccgctgctaaaaaggaggttcccggccgtcgcggttatcccggatatctttataccgaccttgctacgatgtacgagcgtgccggacggcaggtgggcaaagaaggttccatcaccatgatccctattctcaccatgccggaagacgataagacccaccccattcccgatcttaccggatacattaccgagggacagatcattctatctcgtgagctattccgacgcggtgttactccgcccgttgatgtcctgccctccctttcccgccttaaggataagggaatcggtgcagggaagacccgtgaggaccacgccggtaccatgaaccagctctttgctgcctacgctacaggcaaagaaaacaaagaactgatgtccattttgggtgaagcggcactttccgaggtcgatttgcagtatgcccgttttgccgatgaatttgagcggcgctatgtttcgcagggcagcgaggaaaaccgttctgtcgaggaaaccttgaatctgggctggcagcttctcagcctgctgcccaaaagtgagctgaagcgtatcaaaccggagcatatcgaaaaatacctgcccaagcagtaaggagggagcaacttgacgggaaccatcatcaatcccacccgcatggagctgacccgcctcaagcgccagctccgcaccgcccaacggggtcataagctgctgcgggataagcgcgatgagctgatgaagcagtttatggagaccgttcgggaaaatcgcgctttgcgtcagcgggttgaggatggtcttatgcaggcacatgcctcctttactgttgccgccgctctcatgacaccggagatgctcgggcaatctttgcttatccccagccgcagtgtagaactggatatgagctttgagaatgttatgtcggtggagataccccgctaccattttaccgaaaagcagggaggcagtgcatacccctacggctatgcgcagaccagtggagaactggacgatgccgtctcggcactttccggggtgtttcaggatatgctgcgtcttgcagagattgaaaaggcaacacagcttttggcggaggaaattgaaaagacccgccgccgtgtcaacgcgctggagtatgtcaagattcctcagatgcaggagagcattcgatacataaccatgaagctggacgaaaacgagcgtgccaataccattcgcctgatgaaggtcaaggatatgatcctcaaggaggcaatcatggagcagcgcgccgccgatgcagaggtcctgcgggaaagcgggcagccatcctaaaatgaatatgaaaaaagacctccggagctgattgcttcggaggccttttactgtgacggatctattatgcggtctgttttttggccttggcggtgctgtgtgccacaagaccgatgacaagaccgacggcggcggggcagatccagccgagaccgaggcccgcaaggggcagaacgctaccgatcgcttcgatgatgccatcgaggtggcatgcggcacgcagagcggcgggcagggtgcgcagcaggtcataaagggcggagatcagcgtaaggctgatgacccagttatagaccttcttatcgtgggagaagaacttgccgaacagcgccagcaggataagcacgatggccagcgggtagaggaacatcagcaccggaacggcataatcgatgatggcggaaagaccgaaattggcaaaaatgagggaaaccagcgtgaagatgaccgcccagacccggtaagcgggacccttggggaacaggccggtaaaggtctcggagcagctggtgataaggccaacggcggtcttgaggcaggcaagcgttacggtgacggcgaggatcagcagaccgatccggccgaggaaggtttgagagatctgcgccagcgctacaccgccgttttcggctgcgggcagtacgccgcggctcttggcgctcatggcggtgacggcaacatagataagccccatgaataggcagctgaagataccggccttggcggtattgcgtgctacggcgccgggctcatcaacgcccagttcccggatgacctgtaccacgatgatgccgaaggcaaggcttgcaagggcgtccatggtgttgtagccctccaaaaagccggtgaggaagggctgttggatgtagccgcccataggctccacactggaaatgggaacggcggcgggggagaccagcgttaccacgacaaggatgccgaggaacagcaggaagaagggattgaggatcttgccgacccatgtgaggatcttgccggggcgcagagaaaacagcagcgccgcaataaagaacgccagcgtgaacagcaggagatacagcttcatattgccgttctgaggaaggatctgttccagcccgacggtgaaggaaacggtagcgcagcggggaatagcaaagaatggaccaatggtgaggtacagcgcacaggtaaagaaataggcatagggacggtttaccttgctgctgagggaaaacagaccatcactgcgggaaagccccagagctgcaacacccaacagcggcagtccaacaccggtaatcagcagtcccagaatggcgctccacatattgcggccggcaagctgacccactgcagtggggaagatgaggttacctgcgccaaagaacaagccaaacagcatgctggcaacatagatgtactcttttacggttagtttctttttcatggtgtctcctttgtcgatgaggaacgggaacaaaaacagtcggtcgattatacaaaaagaccgcagaaactgtgttcctgcggatctcttttggtggagacgaagaggatcgaactctctacctcttgactgccagtcaagcgctctcccaagtgagctacgcccccatgtgtttttggactgcttgactataatagcatatcatggggagtttgtaaagaccttttttcaaaaaaattcgggtaaaacaaaaactttacccgaatccttttgcttttatgttattccagctcaaaggcgccggtatacaactgatagtatttccctttttgggcgattagcatatcgtgtgtaccacgctcgataatgcgtccgtgttccagcaccatgatgacatcggcattctgcacagtggagagacgatgcgcgatgacgaataccgtccggccatgcatcagccggtccatgccgcgctgtacaatgacctcggtgcgggtatcaatgctggaggtggcttcatcaagaatcatcacgggtggatcggcgactgccgcccgtgcgatggaaatgagctggcgctgcccctgagaaagattgccgccatcaccggaaaggatagtattatagccatccggcagatgggagatgaagtagtgcgcattggccagcttggctgccgcaatgcattcttcatcggtggcatccagtcgtccatagcggatgttatccattacgctaccggtaaagaggttgacatcctgcaggaccacgcctaggctgcgtcgcaagtcactctttttgatcttgttaatattgataccatcgtaacggatcttgccatcggcgatatcataaaagcggttgatcaggttggtgatggtagtcttacccgcgcctgttgctcccacgaaagctaccttctgtcccggctcggcatacagggtaatatcatgcagaacgggctttccatccacataggaaaaatccacatctttcatgcgcacatcgccgtgctgccttatcagctcatagccgccttccggcagaggctttttccatgcccagataccggtgcggcagttggattcaaccaatgctccgtccttctcctcggcattcaccagcgttactacgccgtgatcctcctcactgggttcgtccatcagttcaaagatgcgctcggcgccagccagcgccatgacgacagagttgatctgctgggaaacctggctgatgggcatggtaaagctgcggctgagctgcaggaaagaagcaatgctgcccagtgtcattgtaccgatgccggtcagggttagattgggtaccgctgctatggccaaaagaccacccacaatagcgaccagtacatactgtaaatgcccaaggttgcccataataggcatcataatattggcataggtgtttgcttttgtagcgttttcacagaactcattattgagtgcatcaaagtccttttgattttgttcttcatggcagaaaaccttgacaaccttctgcccgccgatcatttcttcaataaagccatttactttgccaagggattgctgctgctttacaaagtatttggcgctgccgccacctacattctttacgacgaacagcatcaatcccaaaaagacaaacatgaggagggtaagccacacactggtactcagcatggcaatgaatactgctgtgatgctgatgatggaactgaccgcgttgggcaggctctggctgatcatttgccgcaaggtatcggtatcgttggtgtagtagctcatcacattgccatgggtatgggtatcaaagtacttgatgggcaaggtttgcatgtgggcaaacatatcgtcccttatggttttcagggtgccctgcgccacgggaatcatcagccgtgtctgcaagtaggaagccagcataccggccaggtaaatgcaccccatcatggtcaaagcttgaagaagcggggcgaagcttggtgccgactgtccaataagcggagcgatataatcatcgatcagcgatttgaggaaaagagaggcggaaacactggctactgtactgatgatgagtaaaataaaaacacataccagccgggctttatttcctttggcgatgtagcctataaggcgcttcaatgttcctctggcatccttggcccgcttgccgccggtaaagcctcttctaggagcagcactcattcttccagcccccctttctgttgagattcatagacctcacggtagatttcattattggccagcagttcttcgtgggtgccgcaggcgtttattctgccgttatccattacaacgatctggtcggcgtccatcaccgagctgatgcgctgggcaataatgatttttgtggtattggggatttcctcacggaaggcctggcggatcagggcatcagtcttggtatccacggcactggtgctgtcgtccagaataaggatcttcggcttgcgcaggatcgcacgggcaatgcacaggcgctgcttctgcccgccggaaacattggtaccgccctgctcgatataggtatcatacccatcggggaaggtgcagataaagtcatcggcctgcgccagacgacaggcgtgtaccagctcctcgtcggtcgcgtcggggttgccccagcacaggttctcctttatcgtcccgctgaacaaggtattcttctgcaataccatcgccacattgtgccgcagtgtctgcaggtcatagttccggacatctataccgcctacctttacacagccgccagtcacatcgtacagacgggggatgagctgcactaggctgcttttggaagatccggtgccgccgataataccaaccgtctgtccagaggggataatcaggtcaatgtcatccagcaccgttttatcgggacgcttggcatagctgaagctcacatcagtgaattccacactgccgtctttgacctcgtacacagggttatcgcagttggtgatatcactttcctcatccagcacttccacgatgcgctcggcggaggcacgggacatggtaatcataacaaataccatcgaaagcatcatcagactggaaaggatctgcatgatgtaggtgaagaagctcattaggtttccggtggacatatttccaatgacgatctgtttggcacccagccaggagaccaaaatcatacaggcatacacacagccttgcatcagtggggagttgagggccaagatgcgctcggcaagtgaaaaatccttataaatggtgccggagatggtatcaaacttttcgatctcgtggtcctcgcgcacaaagttttttaccacacggataccggaaagattctcctgcactacgccattcagtctgtcataggtcttaaagacccgttcaaacacggggtgaacatgtttgatgataaggtaaagccccacaccaaggatgggaatgacggccaggaaaatgagagaaatatcgtgattgatgcgaaaggacatgaccatggcgaagatgagcatggcagggcagcggataagggtacgaatgatcatcattaaagcattctgcacattgctcacatcggtagtcatacgggtgaccaaaccagcgctgctgaatttatcaatattggagaaggagtatacctgtagatgatgaaacatatcatgccgcagattgcgagcaaagcctgccgtggcgcgtgcacagctccggccgctcagtgcaccaaaagtaagcgctaccagtgcaaaacccactagaatggcaccatatcgcaggatcatgctcatgttgccggcttctatgcccttatcaattaggccagccattacaaaggggatggccacatccaaaagcgattccactagcacataaagaggggagagaatcgcgtcttttttatattcccgtatgcattgggacagtcgtttaatcaatggttcgttcctccttgccaggggtcaagttttctatcactttatctagcaggacataaagggtcttcaactcttcgccggttaatccggcagtcgctttctgctctacccgcaggatatcctgctgcatttgcgccagctgttctatggcgatcggtgttaggaccagtcgtttaaggcgggcatcgccctccacgggttcccgcacgatcaatccgtcccgcatcataatctgcaatatgccggttgcggtgctgcgccgaatatgaaatgctgactccaagtccttttgaaagactggctggtcctcgtgtacttctaaataacccaaaaacattttctgcatcatggttccggggtggactgtatcacgattggtgcccaattcttggtgaatcaagttggagattcctttaatcttcatgcatatagacgggcgctttatcttcatattggctcctttccatcttgttaggatgctaacaattatagcgcagttatatagtcattgcaatcgtcaaactttacaagattaaagctaagatgaaaacaatttatgaacggagtgggcgggcatatttcacatcttttacggaaaaatctctgttactctgcgcctatcatttttccccacggtatggtacaattaaactgtatttttataaggaggagcacacagtgaaaaaacaacttcttttccgccgttttccggcggttctattggctctgctgacggtactgatgctggcgctgctgcctgcctgcggcggtatgacaacccggccgatgggagaagatgacccgctggtgcaggaaaacggcacgctgctggttgaggatggctcctattctacgccagagaaggtggcagaatacctgcatttttatggccatctgccacagaactatttaaccaagcaggaagcgaaagcactggggtgggctgcttcccagggaaacctgtgggaagtagccgaaggaaaatccattggcggtgatcactttggcaaccgcgagggtctgttgccggaagctgatggacgcacctggtacgagtgtgatgtgaactatatgggcggcttccgcggggcggagcggctgctctattccagtgatggactgatctactataccgatgatcattatgcgagctttaccctggtttatggcgaggaggaaacaccatgagagaagtttatctagagggccggctgatgaccgaccgtgccgcggcgcatgcagagatcaagaataagctatccttgccggagtattatggtgccaatttggatgctctgtgggattgcctgatcgaaataggagaggagacggttattacagtgtgccatcccggtgcgatgctttctgccctgcgggaatatggctgccgtttgctgatgacattttttgaggcagaaaaagaaaaccctgttctacacattatcattgggacccacaccgcccaccgagaggaggaaaccgaatgagcgctgttcattttccaaaagatttcgctcttggggctgcttccgctgctacccaaattgatggcgactgcaaggaaagcaactggtatgagtggtacaaaaatggaaagataaaggataacagcgatcccaatatcgcaactgaccatcgcggccatttggaggaagatacccgcctaatggcggagatggggattcgccactaccgctttgggctggagtgggcccggctggagccgcaggagggccagtttttgcaggaagagattgaaaaggtgcgagaggaaattacgctgctgcaccaaaatggcattcatgtgctgcttaccctgcatcatttctccaatcctttgtggtttgagcatcagggcggctttttgggcaaaaatgccgtaaagaggtaccttgccatggtggaatttgctgtgcgccaccttggtgatctggtggatgaatatgttaccatcaatgaaccaaatgtctatgcggtctgcggttatttgggggcaggcttcccccctggggaattcaatatctcccatgctctgcgggtaatgaaggtgatgggcgaatgccaccgtcgggcttaccggttaattcataatatccatgaagaactgggctatgccgaacccaaggttggcctagccatgcatatgcgcgcctttgtgccgtacaatgcgaaaaatttgtggcatcgcattgcttgccgcatttcggaatacaacttccagactaagttgaacaagacctatatgctgggccccgagggcccctacgccgattttttgggcctcaattattatgctcgtactgctacctccggcttgggggatggtactttgccgaatgttccggtgaatgatctaggctgggagatctacccggccggcattgtggagtgctgccaaaaactccacgcccttctgccggaattgcccatttacatcaccgaaaacggtacggccgataataatgatgcgttccgccgtcgttatctttatgagcatctcaaggttctttcggagagtggtctgcccgtcacccgctattaccactggtgctttgtggataacttcgaatggctggagggctttactgcccgctttggtcttgtgcatttcgataccgatactcatgcccgcaccatcaaaaagagcggagagttctatgcccgtatgattgcggagcatggtatcaccggagaaatggcggcagaggtggaaaaggaggtctatcccaatggctgataccccttggtggaagcaaaaagttatttatcagatctatcccatgagcttttgcgatagcaatggtgatgggattggcgatctgcctggcatcctctcccggctggattatctgcaaaagctcggtgtcggcgccttgtggctttcaccggtctatccctcacccaataaggataacggctatgatatcagcgattactgcaatatccaccccaattatggtacgctgcaggatatggataccctcattgcagaagcaaaaaagcgggacatccgcattattatggatcttgttatcaaccacaccagcgatcagcatgaatggttccagaagagccgccgccgcatagaaccctacaccgattattacatctggcggaaaggggaaaagggcaaaaagcccaccaactggggtaatttcttcggtggagattgctgggagtacgatgacctgcgtggggaatattatcttcatcttttcgctaaggaacagcctgacctcaactatcacaatgaagcagtcatcgaagcgattgaagaagccatgcatttttggctggagcggggtgtggcaggcttccgctgtgatgtcatcaatatcatctacaaggaagccatcaaaaacggtaagtggcgtcctgccctcaccggcagcgagtattatctctccacccccggctgccatcgggtgctgcaccgtctccatgaagatgtgctcgccaagtatgatgcctttacggtaggggagacggtttttgttacgcctaaaatggcggatgacctagtcaatcccacccgtgaggaactttccacggtatttgcctttgagcacatggaaaccgactgctataaaatcaaatggtttctgcgccggttcaaccccgattgcttctttgcatgccttaccaagtggcagaaggctctgccgtggaataccgtttatcttgaaaaccacgatcagccccgctcggtttctcgcttcggtaatgatacccaatatcatgatgaaagcgccaaggcacttgccacgctcgttcttaccttgaggggaacaccgtttctgtatgaagggcaggagatcggcatgaccaattttgattttccagatatgcagaaggtgcgcgatgtcgaatccatcaatatctggaacatcggcaagcggctgcacctgccgcgctcactgcgctggcgcatgataaagaccaaaagccgcgataatgcccgcacccccatgcagtggaatgacagccccaatgcgggctttactaccggtacgccgtggctttcggtcaatggcaattatccccgtatcaatgtagcagagcaggagaatgcgccaaactctgttttagcgtattaccggcagttgattgctttccgtaatggcagtgagattctacaagcaggtgatttttccgaattatatcgcaaggatggagtttatgcttaccgccgcagtctaaatgtcgaaagcattattgttgttatcagcctttctacaaaggaacgacccaatcccgtttcaggcaccgttgtcctttccaactacggtcggcaggaaagtcccgcctgcctttctccttatgaagcacttattctgcgggaggtgtaggctatgagacatatcactcagcaggaaaatacctttctgctttccaccgctcatactgctatgctgcttcaaattacaaagtacggtcatgtggaactgctgcattacggcatgccggtatccatagaagacgccgcggccttggcagcccgccgtactatgccctatggcagccaggtgatgtataccgaagaagaccccacctactgcctcgataatattcctcttctctggtcgggggttggcaaaggcgattttcgcatttctcccattgaactggaattgccggacggcacccttaccactgatttcgtcaatgaggattgtaccctccgtgcagggacgctgcccgctgtggggttgcctgctgcctacgatgaaagcggtgaagcggaaacgctggtgctttccctcagggaaaagaaatttgccctgcggctggagattatcttcaccgtgtttccagcagcggatgccatcacccgccgcactgttctttacaatgacgaaactgttccaattactgttcatagcctgatgagtcagcagatcgatctcccacagctgaagtatgagatgcttacccttgatggtgactggataagtgaaacgcatgtgcatacccggtcggtgcagccggggcggctggtcaatgaaagcaccaccggcttttcctccaaccggcacaatcccggcgtgatcctactggaacagggaacaggagagaatgccggtcttgcctatggctttaatctgctgtacagcggcagccattacactgctgtggagcgctctccgcgtgactttgtcaggattatctccggtatccagccgcagggcttctgctggcggcttcccgcaggggaaattttccgtgcaccggaagcagtgatgactttttccaatgagggcctgaatggccttagcggcaatttccaccgctttgtgcggcagcacattctgcgcggagagtggaaagaaaagccccgccccgtcctcctcaataactgggaggcgtacttctttgattttaccgaagcgaaattgctttccctcgccaaacaggccaaagcggtcggcgtcgagctgtttgttttggatgatggctggttcggggcgcgaaacagtgatacagcggggcttggcgattacaccgtcaaccgcaaaaaactccccggtggcatcgaaggcctggcgcagaagatcacaacgatgggccttcgttttggcctttggtttgaaccggaatctgttaatctggagagtgagttgtaccgcacccacccagagtgggctttacagcagccgggacggcagccctctatgggacggcaccagctcctgcttgatcttacccgtcctgaggtgcgggattatatcgttcaccacattacccatcttttggaccattgccccatcacctatgtcaagtgggatatgaaccgccacatgagcgatctttattccgctgtcacggcgggcggggagctgccctaccgctatatgctggggctttacgaggtgctggaacgcatctttacccctcgcccccatatccttttggagacctgctcctccgggggtaaccgttttgatcttggtatgctgtgctactcgccgcagatttggtcgagtgatgataccgacccgattgagcgtctttccattcagaaagggctcagctatttctacccgccctgcaccatgggcgctcatgtttcacagtcgccccaccaacagactctacggcagacaccgctctccacccgtttcaatgtcgctgccttcggtgttctgggatatgaattggatctgggcgagctttccccgcaggagaaaaagcaggtcgccgcgcagatagaatggtacaaaaaataccgccccaccctgcaatacggtgatttgttccgtgtccctacccgtcgccagggtcttatcagctgggcggcggtcgcaccggataagaaacaggctgttgtcctgctggcgcagcggctttgcacagcggctcctccagcggactatctcacggttccggggttgaagtcggaggccagataccgtgttgttgccgtaccgcagcaggtggcggttgctcggttcggcggcttggtcaagcacattgccccggtcaagctttccaccgatggcctggtgctgcgcacggtcaatcgtcactacgccctgccggatggcagcttcaccgccatggcttccggtgcggcattggccagcggtattccgctcaatgatcagtttcttggaacaggctaccataaagatctgcgcctttggggggattttggttcccagctatatctcgtcgagcaactcgacgaaaatgaggaggataacaccaaatgaataaactggatagaagaaatatgattttcttcggacttggtaccattgggcgggatatgttctatgcctttgaagctaatgccctcatttactacctttccaatgttctcagcctgccgttaggcgtctttttggctaccagcatggtttttactgtgctgcgtgtctttgatgctctgaacgacccgctgatgggtctgctggtggataatactcgctcccgtcacggacgctttaagcccccgatggcgctgggggccttggcgggcggtgc

SEQ ID NO: 4554 - DNA, 13267 bp, Unknown
  16S sequences of unknown bacteria
ggatttgtgaaatgtgcaggctgtttgcatacaaaaaaagaagatgcaatatgtattgcatcttcctgcatattttgattgagttgttgcttcatgcctctgctaaaattctgcggaaccggtgacacgtgggaaggggagcacatcccggatgttagaaatgccggtcatatacataatcagacgctcgaatcccagcccatagcctgcatgtttgcagccgccgaaccggcgcaggtcaaggtaccaggaatagtcctctttcttaagccccagttcttccattcgtgcggtcaaaacgtccagtcgttcttcacgctggctgccgccgatgatttcgccaacgccgggtacaagcagatccatcgcggcaacggttttaccgtcatcatttaaacgcatgtaaaacgctttgatttctttcggataatctgtgacaaataccggcttttggaaaatcttctccgtcagataccgctcgtgctctgtttgcaggtcgcagccccagtaaaccgggtattcaaattcttctttgtgctgctccagcagctttactgcttccgtgtaggtgatttggccaaaatcagcctcaatcaggttttgcaggcggctgatcagttccttgtcgtaaaaatcattgaagaatttcatctcctgcgggcactgttccagcacataccgcagtacatatttaatcatgtcctgagccagcgccatgtcgtcttgcagatccgcaaacgcaatctccggctcgatcatccagaattccgcagcatgacggggtgtattggatttttccgcccggaaagtggggccaaaggtataaacgctgccgaaagccattgccatgcattcggcctccagctggccggaaaccgtcaggctggtcatttttccgaaaaagtcctgactgtaatctaccgctccatcctcagtgcggggggcagaatcggggttgaacgtggtcacatggaacatttcgccggcgccttcgcagtcgctgccggtaatcagcggcgtatgggcatagacaaagcccctctcgttgaaaaaacggtggatggcaaaagccgctactgaacggacgcggaacgctgcgttaaaggtgttggttctggggcgaaggtgagcgatggtgcgcagatattccagggaatggcgttttttctgcaatggataatccggagcggaggcgccttccaccacaatttcacaggcgtggatttcacagggttgtttggcgttgggcgtcagcgtcagcgtgccggttacccgaagagctgtacctacattgcatttggcaatctctttaaaattcggtactttggcatcttcaaaaaccacctgcaggttggaaaaagaactgccgtcatttaattcaataaagcccagtgctttggaatcacggatggtcttgacccatccgcataccgttatctgctggccggccagtgcgctggcctgttccaatacttttttcaattccgttcttgccatgaaaagaacctccgtctaacaaaaataggaaaatttctgcatcccgctgcggtgcagatcgatcaagacgccgtgcggaacattatgggaaatacattttctctatattatagtatattttacccgggataacaagcaaaacgcgtatttttgcatgagaaatccgtgtttgtgatgaacaagtgaaaattttactttcctcttggcagttaatcggtttcttgttataataaaaaacatatgccaaatcttttgggcttgttttgacagctttgacggtttatccgcacgatgatagaaagccttttcagttggtttgcctgttttaattacattataacggagtacaaatatgaagcgatatgtagctctttttttgacggtcgtaatggtgctttttttgccctttcgggcttctgcggcgtatgcggtcgaaattccggtcactgcaagccagacttcggtggtgatggatatatctaccgggcaggtgctggtggaaaaggaaatgaatcaaaaaatgtaccctgccagcattaccaagattatgaccgttctgctggcgctggaaaacgccgatcctgccactgtgcacaccatgagctacgaagctacccattcgattgattccggcagtacccatatcgctttgaccgaaggagagcagattaccctgaaggatctgatctatgccacgatggttgcttcggccaacgatgcggcgaatgggatcgctgaatgtgtgggcggcagcatagagcagtttgtagcgatgatgaacgaaaaggcaaaagagattggcgcggttaatacccattttgtcaatgccaatgggctgcacgatccgaaccattataccacagcttatgacatggctttgatcacccagtatgcactgggagtagaggggtttcgggattactggtgtgcggaggagtataccatccaaccgaccaataagcaaagccaggcgcggaatctggggacccagcacagcatgtttgtggagtcccagtttacttatgaaggctgcactggcggtaagctcggctatacggacgaagcacgtcacacttcggttactagcgccaaacggggagacttggaattggtctgtgtaaccatgagcagccagaaatacgaaaagtatgaggatacagccgccctgtttgattactgctttgattcttttgacaaagtcacgctttctaaacgcagcttaaaaggctttgtcattcctgttttggatggagatacccaggtgcaggaggtgcgcatttatccggataacagcattgccctggagttgcaccggcagtatggcgtggacgatctgaatttggaatatcaggtgccggaaacttatcgctacggcgaagaagtgaccccgtcgcttaaaattacgctcaagtccgaaagcagcagtatgtatggggatctgggcagtttcccgcttcaattttctctgaatgatacagcgagtcagaaggtggatgccgcaaccggcctgccggtaaaggacaatacggtattttggaaaaatctatggaatattttaaagtgggtcgccattatcttggcggtgcttgtcgtgctgtttttcctgttggtggtttcggtgcgggtccggcactttctgtatcggaaaaagaggaaaaatcgccgggtcagatacccggttaccgccgggacgcagatcgcgcaaagacaaggtcctgtccatatttacgtgcagccggatgcggcgggccgtcgtccccagaccaaacggccggtatccggtacgcagaaaaacaggcgttagccggaatggaatgaatttatgaaaacgtttttaatttccgccaacgacgcaggacagcggctggacaagtttttgaccaaagcgattccccttttgccgcagccgctgttgtataagtacattcgtttaaaaaggatcaaatgcaacaaaaagcgctgtgaaatttctactcgtttgcaggaaggggatctgctggagctctacatcaacgatgaatttttctcgccccctacgggagaggctgcatttttgcatgctccggctcagatagatgttctgtacgaggacgaaaatctactgttggtcaataaaccttccggtctgattgtccatgaagacgagaaagaagcgttcgataccctgatcaatcgaattctgcattacctgtatgagaaaaaagagtatgatcccaaaaaagaaaactcttttgttccggccctctgcaaccgtatcgaccgcaatacctccggtattgtgctggcagctaaaaatgcggcagcgctgcgggaattgaatcagcgcatcaaggaccggcaggttcaaaagcggtatttatgtgtcgtgcacggcagaatgccgcagcccaggcagacgctgacagcctacttaaaaaaggatgcggacaaaaatcaagtgcgggtatacgaccagcccatcccggacggccggacgattcggacggcttatcaggtgttggcggaaaaaggcggcttttccttgttgaaaattgacctgttgaccggccgcacccatcaaatccgcgctcatatggcttatctgggccatccgcttttaggagataccaaatacgggaaaaatagagaagaccggcagctgggctaccgttttcaggctttatgtgcctatcaggtaaccttttcgtttactgaagaagaggggcctctttcctatttgaacggaaaaacctttactgtcccgcaggtggattttgtcaaggagctgtttggggaagaggccggaaagctgtaaaaaggagggggaggatggatcacaaccactatgggcaccggcagcgtttaaaggaccggtttctgcaaaccggatttgccgggtttgatccgcacaatatcctggagcttttgctgttttacagcatccctcagaaagatacgaatgatctggcccacgagttgatgaaccggtttggttctttgtccggcgtttttgatgcttcttatgaagatttggtaaaagtcaaagggatcagtgccaatactgcaacgctggtaaaaatgattcctcagctggctaacgcgtatctcaatgaccgaaacgatccgggcttgattctggattcggtggaaaaggccggcgcgtttttgctgtccaaatatatcggcgttaccaatgagcggatttatctgctgtgtctggataataagcgcaaacttttaaactgtacgcttatgggagaaggcagcttaaataaagtgggaatccaccctcgtcggattttggagcaggcattgcagtgctctgcttccgccattatcctgtctcataatcatccacatggcactgcgcttccttctgatgcagatatcctggtgacccgccggttatacgatatggcgcaggtgctggaaattactttgtatgatcatattatcgtagcaggcgacgattttgtatcgctggcccaatctggtattttcgcatcagattgacgcatggccttcggctcatgcgtttttttctgatgaaccggtgccggattctgcgtgtttcctgtgcaatagcggtatgtttaccggcaaaaaacggcatactactcctgaaacagaaggaggtattgccaatgttgcagatacaaaacgggcgggtcttgaccatggcgggaaagacttttgaaaacgggcaggttttaatcgaaaatggaaaaatcaaatccgtgggagaatatctttccatccccaatgcaaaagcagaggtgattgatgcgcgaggtggctggattttgcccggcttaatagaaactcattgccatatcgggattaccgaagaaaagaaaggttttgaaggggatgactgcaatgaagtcaaccaaccggtgattccttatttaaaagcactggatgcggtaaaccctatggattccgctttccacaatgcactgagcgcaggcattacagcggtcatggtgggacctggcagctccaatgtggtgggcggccagtttttggtcatgaagacccatggccgggtgatggatcagatggttgtcaaagaaccggcggcgatgaaagtagcctttggagaaaatccaaaaacaaattacagcggacagaacaaagtcccgtccacccgtatgtccgtcggggcgctgctgcgggatgagttgacccgagcgcagaattaccgttcccgcaaagaaacggcgcagcagaaaggcgaagcttttgaagaagactatcaaatggaatgctggctgccggtgctgaccggcaaaatccccatgaaggcccatgtccatcgggcagatgatattttgacggcaatccgcattgcaaaagaatttggtcttggcttaacgttggatcattgtacggaagggcatttaatagcccgaaaaatcaaagaatccggctttccggcgatcatcggcccaacgatgtcctctcgcaataaaatcgaagtgcagaacatggattttaaaacgcctggcattttgcaaaacgagggagtgctgattgccattaccaccgaccatccggtaacccgcatccagtatttgccgatttgcgccgggttcgctgcaaaagaagggcttggtatagagcatgcgctggaggccattacctgcaacccggcaaaaatctgcggcgtagcggatcggattggaaccattgaaccaggcaaggatgcagacctggccatttttgacggcaatccgatggaggtgtttaccaaaaccctctataccattgtaaatggacaggtggcctatcgatatgacgaataaacgtaggaggagagtatcgcgttttttcaaaagcgaatcgtccgctgtcctgccggtaaagtcgtttgggcaggtgaaaaaattcaggcatctgaagcgcgtcatgatgatatgaaaagcggatgatgtatgaagttttgcacatggaccgggacaaatccatagctgagattttatggccgtgccgcccaaggcggcacatggcctttttctgcttcctatacatagcaaaacaaaccgggaaagaaaggtttctttcccggtttgttttataaaaaggatgttatctgttttgctctttgttttggttctgttggttttgttgtttttgctgcttattgtttttagattcctgcatgaatggtcacctcctaaaatttcaggcgaggagatatcaaaatccctcgatacaagtatggccttttggagtgataatatacacgggatgccagaaatggacctgtttttcaaaataaatattttcaacatttttgtagtttttttggaattttaaaagttaatagaatcataagaggtttatcaggaggtgctgcggtgagaggaaaaaagacgggtgtgctgctggtggccttggcagttgcggtactgctgagcagccgcggcgaaaaagaaaccggctcggttttgtccgcatatgattacggatatcaggcgggcgaggcggacgagatcgctttcgaaaaaccgggggatgtgttgttttttgcacaggaggcgtcttcctccgtgatgcgttattttgccgcaaacctgcaaacggctgagattggaaccattggcgactcacctacaaatcccgcatgggggactgacgcgggagagcctgtgcaggtgggagattcgtactatttggccgaagcggaagaaggcttttttgataaatatgtccgggcttttgaggttttcggcgattatattctcctgagcaattctctggagatggcgctttaccgtttgacagaggacggtgtgcagttagttgcgaaatccggctggccctatgaaggaggggaaagaacggcgttttacccggctgagtccgtgacaccgcaaaatggcaaagcgctgttttgcgcccaccattttttctggattttggatgcggagcagggaaaggtcatggtccttccggtccccggtttaaaggttggttcaggagattattgtaaaagcgtttttacggatggaaaaaatgtcgtttacagtatttatcactccggtttgccgaaccgctttaccgagtatcggatcatcccttgggctgatctggagcacggcgtttcgcagacgatttcattggagccgggaaaggcggcggatcttggcccatacagctattgagaaaggttcgaaaagaggaggatgctgatccccgggaaacgacgtggtaacgcgaaaaaagaggcgggatgtatcctgcctcttttttatgcggccaaaacatcgcctagccaagcgccgtttaaagatcccctttgattttttccagcgcacctttttccagtcggctgacctgtgcctggctgatgccgatttccccggctacctccatttgcgttttcccggtaaaaaaacggagggaaaaaatttttttctctctgggcgtcagattggaaatagcctcccgaatagacagctcctccagccagttgctgtcgtcgttcttatctccgagctggtccatgacgaaaatggtgtcgccggagtcggaatagactggttcgtaaagagagaccggttccacaatggactccagcgccagcactacgtcctgcttgcgcatccccatatcctgggcgatttcttccaccgttggctcttttaagttttcaccggttagccgctccttggtctgcatagctttgtaagccacatcccgcatggaccggctgacccggatgctgttgttgtctctgagatagcggcgaatttccccaacgatcatgggaacgccgtaagtggagaaacgtactccctgttcggggtcaaagtggtcaatggccttgatcaggccaatgcagcctacttgaaacaaatcgtccagattttcgccccggttggtaaatttctgcaccacacttaaaaccagacgcagattcccgttgatcaactcttcccgggctttttcatccccctgtcggacccgcttgagcagctcggttttttccttttccttgagcacctttaatttagctgtgttaacaccgcagatttcgactttgctgtaatacatcccatcacgcccgcttcctcccgattttgccgcctgccggacggctgtgcttttatcatggacagcgccttgtcccggcatacaaaatttttctttggcaatttttgttaggcataagcggacaaagaaaagccataaacatacgaaaaggggggcggtgcggatgatctaccggatttcagattttaaatataaggatgtcattaatatcaaagacggaaattgcctgggggccatctgcgacgtggaaatcgaaagcgaaaaggcggaggtgatcgcagtggtagtgcgtggacggttccgctttttcggcctgtttggaaaaggggaggagtttgtcattgcgtgggaccaggtgaaggtgatcggcgaagatgcggtgctggtctgctttgaccgccgcccggagccgagaagacccaaacatcctagacattgcgcggaaaacgagctatactgaaaaagccggaaaaatggcaaaatcctctcaaaaagtacttgccttttgaaacagactgtgctatactaacacggcaaaacacacgcttgggttggatttgggtaggtgccgggaagtttcccggttggccaaaaattgcctgggcggcggaaaaacctaaggaggaactgtaaaaatgggcgttatttcgatgaaacagctgttggaggccggcgtacatttcggccaccagaccagaagatggaaccctaaaatggcacagtacatcttcaccgagagaaatggtatttatatcattgacctgcagaagaccgttaaaaagctggaagaagcttacatgtttgtcagagatgttgctgctaacggcgacacagtgttgtttgtcggtacgaaaaagcaggctgcagaatctgtgaaagaagaggcgctgcgcgctggcgtacattttgtcaacgctagatggctcggcggtatgatgaccaacttcaaaaccatccagcgcagaatccagagactggctcagttgcggaagatggaagaggacggcacttttgatcgcctgccgaaaaaagaagttatcaaattgaaattagagatcgaaaagctggagaaattcctgggcggtatcaaagacatgaaaaagctgcctggtgctttgttcgttgttgacccccgcaaggagaaaattgcggttgctgaagcgaaaaagctgggaattccggtggtagcgattgtcgataccaactgtgatcctgacgaagtagattacgtcattcccggcaatgacgacgcgattcgcgccgtaaagctgatctcttctgtgatggctgacgctatcatggagggcagacagggcaatgcggaagaagctgccgtagaggaaaaagaagaagcggaagcagcggaagaagctgcgaaataagatttttaccgaaatgcccgagcttgtcccgggcattttacgggatatacggtaaaatggatggaagcgaacatccatagaaggacgaaaaatagaaataggaggaattttccatggcatttactgcaaaagatgttcaaaatcttcgtgagagaactggatgcggcatgatggactgcaaaaaagcgctgaccgaggcgggcggcgatatggaaaaagcaatcgagctgctgcgtgaaaaaggcttggcggcacaggcgaaaaagtccggccgtattgctgcggaaggcattgtatatacctatgtcgatgaggagaaaaaagtcggcgttgtgattgaagtaaacgctgagactgactttgtagccaagaacgacagcttccagagctttgtcgcttcctgcgcgaaagcggttgcggaacagaatcccgctacggtagaagagctgatgacctgcaaggcagacgaccagttcaccgtggaagaagccctgcgtgagaagatcctgaccatcggcgagaacatgaaaatccgccgttttgcgcgatatgaaggcgaggttgtcacttacagccatggcggcggcagaatcggcgttatggtgaagtttgatgcacctgcggatatcgctgcgaaggatggctttaaagcgatggcgaaggatgttgcaatgcagattgcggcagccaaccccacctatttggacaaggctggggtaccggctgacgaaattgcaaaagagaaagagattctgacccagcaggcgatcaatgagggcaaacctgcgaatatcgccgagaaaatggtgatgggcagaatcaataaatattacaaagaggtctgccttctggagcagcccttcatcaaagatggcgacattacggtttccaagtacatcgaaaactgcgccaaagaattgggcggccagatcaaagctgtttgctttgtccgctttgagaaaggtgaaggcctggaaaagagagaggacaatttcgctgatgaagttgccggtatgatgaaataatcatccggttagttcctttggagatttgaaaggcgctggacgcattttgcggccggcgcctttttggtattttttctgttttaaaattttttcgtatttcatgcaataatccggcaggttaacgcattattccaatgaaaggggcggatatcattgctgttcttctgctcggtaccggcaaaggaatcgaccgcaccaatcaaagaagctttgctggaagaatatatggcgcagattgccaagggggatcgcgacgccttgggagccttataccatcaggcaaacacggcggtttacagttttgccctgtccattttgaaaaacacgtcagatgcggaagatgcgctgcacgattgctttttggatatttaccaggcggcggaacattaccgtccgcagggcaagcctatggcctggatttttaccattgtccggaaccgctgcctgcaaaagctgcgggaacgaaccagaacggcggatatcccatcagaggactgggaaccgtatctgcaaagccgtgaaagcataaccccggaagataggctcctgatcggcatttgtatggagcgcctgaaccagcaggagcggcagattgtcgtgcttcatgcggtgtccggttttcgtcaccgggaaatcgcgcagcttttacagcttccgctgccgacggttctttccaaatatcatcgcgcattgaaaaaactgaaaaaatatgtaacagaaggaggagaacggtgaaaaatcgggaaatggaagaaaagatcaaaacagcgtttcagcacgcggccccagacgttttggaatctgttctctctgactgtggggaacagaaaggaacagtgataaccttgacagaaaaaaagaaaatcagatggataaaagcagcctccggtattgcggcagccttgatgataacgataggcggtatttggggatatggggagtaccagggtcaaaatactgtggcgtcgacgatttctttggacgtcaatcccagtattgaaatccgggtcaataaatatgaaaaagtgctggaaaccctcgcgttgaatgatgatgcagaggttgtgctgggggacatggactttaaaggcagttctttggacgtggcgataaacgccctgattggctcaatgctgcaaaacggatatctggacgaattggccaactctattttgatcagtgtggataaccaggatccggctttgagtacggcgcttcaggaaaagctttcgcaggaagtaaatgcattgctccagaccaattcttttactggttcagtgctcagccagactgtatcggatgatgatgaactaaaaacactggctcaaacctatggaattaccccaggaaaggcgcagctggttcagcagctgatccgacaaaatacgttgtatacctttgaggaactctcccggctatcggtaaacgaactgaatttgctgatagcggcgaataatacgccgctggaaaatactgaggtggtaggaaacgccagcgataagtcatatatcggtgcggataaagcgaaagaaattgccctttcccatgcgggagtatcctcttccgaaattggtttttccaaagcggaactggattttgacgacggcagacttgtttatgaagtggattttactactggtacagtagaatatgaatacaaaatagatgcgtcaaacggagcagtgctgaaaagcgagcgggaacggaaggatgacggggatttctcatcggcccagcttagcaatacgcatatcgacgtggatcaggcaaaatctattgcgttatcccatgcaaggaaaagcggagcagatgctgtgttttccaaagcgatgttggacgaagatgacgggattttagtgtatgagctgacttttttggcagacggacaggaatatgagtatgaaatcagtgcatcgaccggtgatgtgataaaatatgagcaggaaccatccggtcagtcgtgggcccattcgaatgtgtcttccgaaaagttgatcgaaaaagagcgagccaagcagattgcgctctcccacgcgggaatagcggaagaaaatatttcccggtatgagtcggagctggatcaggatgatggtaaggcaaaatacgaaatttccttttatgcaggtaaagtggagtatgatattgaagtgaacgcagtgactggtgcggtggaaagttttgagatggaagaagattgatgccgctattgccagccaaaaaaggccctttgaaaaagggccttttttggcataagaaacatatcgaaatcgacaaaaaacaggatttttaatgaaaaaaggggagttttctcctgttttataa

SEQ ID NO: 4555 - DNA, 32759 bp, Unknown
  16S sequences of unknown bacteria
actccacggacaggcttttttctacccttccgtgtctacttttataatagcatcaatcgggctttatttttatccgctgctaatcattttaatttaaagaggaacactgtatgaaaaagcatttcgcaaagcagattttcgccgcggcccttgcaatcagcttcgtgtgcgggctttcggcatgccgtgaacgcgaagaagagcaactctcgttaaagccggtgatttatctttatccggaagaagaaacggacgtctcggttacgctcgcgtacgacggaacgctcacttgcacctacccgaattacaaaaccggctggcatgtttcggcgaaacctgacggtactctgacggacgaggacggccaaacgtataactacctgtactgggaaggcacggacagcgcggaatacgacctttcccacggcttctgcgtagcgggcagcgacaccgccgctttcctcgaaaatgccttgcgcgacctcggactcacccgcaaagaagcgaatgaattcatcgtgtactggcttccgcagatgcaggaaaatccctataatctcatcgcgtttcagtccgactgctatacgcaggtggcgcagctggatatctcccccgcgcccgacacgctccttcgggtcttcatggcgtggaaaccgcttgaagagaaagtcgacattcccgcgcaaacgctcaccgctcccgcccgcgacggcttcacagcggtggaatggggcggcagccgcataaactgagccgtagctcttgcccgtgcagagtctcacggcgttcataccgcttaaaaacacgcaaaaccttcccggtttccaaacggaaacgaagccgggaaggtttttgttttgtttatgttgaattttggatgccgaagaaattaagttaaaaagcgaaagccgctttcaaaacgaatgattgcgttttaagtatgtacttgcgtgtacttttacgcggattcgcttacgtttctgcctctttcccctcacctttttcgtctgcctcggtatcctcgcaggcacagatggacgcgaacgtgtaggactccagcttatcgcgcacaagctgcgagacctcaccgtagatgtgatgcaaacggcacgaagtgcgctggcagctgtacgcatcgccctggcagcgggaaatcatatacggcccctccaccgcctcgatcacgctgcgcagcgtgatctccttcggcggctttgcaagctcatagccgccctttgcgcccttatacgagcgcacgatgccgtccgaaacgagcgtgcgcagaatcttcagcgtaaagcgcagcgtgacgcttgtgcgctccgagatcgttttggcatctgcgcgcccggggttcacggccaaaaattccacgatgcggactgcgtagtccgcttccagtgtcatgtgcatggtatgtgcctatcctttcgggatcaatccagaaaatccttcagcttcttgctgcggctcgggtgacggagctttctgagcgcctttgcttcaatctggcggatacgctcacgggtgacattgaattccttgcccacttcctcgagcgtgcggcttctgccgtcttcaaggccgaagcgcaggcgcagcaccttttcctcacgcggggtgagggaatcgagcacatcgccgagcgtttcgcgcagcagcgtatgggaagcggcatctgccggggccggtgcgtcgtcatctgggataaagtcgccgaggtggctgtcctcttcctcgccgatcggcgtttcaagggagacaggctcttgtgcgacgcgcatgatctcgcgcactttatcaatcggcatatcgagctcatcggagatttcctccgcggtcggctcgtggccgctcgtgtggagcagctggctggagaccttcttcaccttattgatggtctccaccatgtgcaccgggatacggatggtgcgggcctggtcggcgatggcgcgcgtgatggcctgacgaatccaccacgttgcgtaggtggagaacttgaagccctttgtataatcgaacttttcaacagccttgatgaggccgagattgccctcctgaatgaggtcaagaaactgcatgccacggccgagatagcgcttcgcgatgctgacgacaagacgcaggttcgcttcggaaaggcgcttcttcgcggcttcgtcgccgtccttgatggcgatggcaagacgcacttcttcttcggaggaaagcagcggcacgcggccgatctctttcaggtaaactttgactgggtcatcgatggcgacgccttccatgcccatgccggcatcaaaatcgtccgtatctgcgccggatactttggaaaggtcgatgtcatcaatctggatatcgctgaagtcatcgataatctcaatgccgtgcgattccagtgtatcatagaatttttcaatgtgctccgggtcgaaatccaattcgccgatggcgtcgaggatctcctttgtggtgagctgacctttgcttttgccgagctcaatcagatcgcggatcacggttttcttatcgggtgctgccatagtttatcatacctttcctgtgttttcccttattccctcggcagcgtctgcacgctgcctttttatctcaattctgttttaaagcctaacgttcctattttttctgtttgcgcagtgcatcgagctgcgcctgcaggtcggcggggttcgcgccacgcaccttatcggtatcggtcaacgcgccttcgctcaaaatgatctgcacgtattcttccgcgtctttggcggtgatgccggcgttttcctgcacaatcttcgcaaggcggcccatttcgtccggcgtacattccgccgaaaagtctgtaatctgcggcgatgtgaccgtttcttcgtttataatcttgcccaggaggctctgatataaccggcgattgaacgccgtcacgaatttttcgggcggcacgcggcggttcaggctctgtgcgaggtcattattgtggaaaaggcacgcgatgagccgctcttcggcgttggccacgcggacatagcggcgcttttcggggtttacggtatcgcgccgcgcggaaagctgctccgtcatgtccctttgctgctgccgctgcgccgcacgcgcttttttgcgcacggaaacggacatctgctgcaaaatggcgtttttgtcaacattcaattcctgcgaaaggcggctgacgtacacgtcgcgctcaatggcgttttcgaggcccgccagcagctctacggcggccatcaggtattgaatacgcccgttttcgttgcttaaatcatacccgcttttcagctttgcaaggcggtattccacatcgttgccgctttgctcaatgagcctacggaaacgcgccgcgccttcatcaccgcatgcgttgatgaactcgtccgggtctttgttgccgggcacggccatgacgcgcaccaaaagccctgcgccgcgcagaatgggaatggcgcgctgtgcggccttttgaccggcttcgtcggaatcgtagcaaatgacgacctctttcgcatagcgggcaatgatgcgcgcctgctctgcggtgagtgccgtgccgagcgacgcaatggcgttttcaatgcccgctttgtgcagcgagatgacgtccatatagccctcagctaaaatgatgcggtcgttttcgagcgcgttttttgcaaaattcatcgcgaaaagaccgctgctcttgtggtagaccggggtatccgatgtatttatgtacttcggcttttcgtttgtcaaaatgcgcccgccgaacgcgaccacgttgccgcgcagatcaatgataggaaacatgacgcgtgcgtggaaacgatccatcgcgcggccggagcgcgtctccaccgcgacgttcgccgcaatcatctcgcgctcggaatagcccttggagcgcaggtgattaacgagcgcaaagcggctttccggcgcccagccgagcccgaaatggcggatcattttcatgggcaggcgtctgcgcgcgaaataatcaagccccggcttaccctccgggcttaaaagcgcgctgtggaaaaagcgggcggattcgcggttgatttccagcacacgctgacgcaggcggctcatggaatcgtccacgccctgctccggcatttgcagccccacgcggtccgcgagcattttcacggcctcgatgtaatcgagattttcaatcttgcgaatgaatgtgatgacatcgccgcccgcgccgcagccgaagcagtaaaacgagttattctccgggtagacgttgaaggacggtgatttttcattgtggaagggacacagtcccaccatgtttttgccgcgccgctttaggttgacatacgaggaaacgatgtctgtaatgtcgcagcgcgatttcaagtcctgcataaaggactccggcaacggcattccaccgccccctttcgtgaccgccggcgcgatgccattgggattacgggcaaagctcggagcaaaacgccctgatttttgccctcatagtattatatacgccgcaaacggcgaaattacttcttttattcttcaaattcaaaaaatttttttccgtcttctgtcacatcgacctgcccatttgtggcatccgcaagttttttgcggaatgtgccgagcagctcgggcgccaaatgaaatttgacggtaactttttcctcaaagaccgtgtcgtccgtcacgccgccgcattccggaacaagcgatgcaacgcggccgtaccgaccgtaatcgcaggtaagcgacaacagcaggcactcgcgcatggtaatgatctgtgccgcctgcagggcgatggacgcggtgtgcgaatacgcgcgaacgagaccgccgcccccgagcagaatgccgccgaaatagcgcgtggcgaccgtgacgacatccgtaacgccgcttttgcgcaggacatccagcaccggcataccggccgtgccctgcggctcgccgtcatccgaaaagcgcatggtgccgtcgcgcaggatatacgcatagacgttgtgactggcatcccagtgctcggattttttggacgtgatgaaatcgagcgcctcctgctcggtctgcaccgggcaggcatagccgatgaaacgcgatcgcttttccacaaactggtcctgcgcgtttttccgcacggttttgtactctgccatttttaccgctcccctctgttttgaaacgaacgcgatttgcctttggagaaaaaatgggcgatgcccgaaagagcaccgccctgaacgatccatataattttacttcgtgataccgtagcgcttgttgaacatatcaacacgaccgcttgtatcaaccagcttctgcttacccgtaaagaacggatggcacttggagcaaatttcaacgcggatgtccttctttgtggaacgcgtgtgaatcacattgccgcatgcgcaggtaatggtcgtttcctgatagtccggatgtatattcttcatatctgtcacctctttcggttgatctgcggttagtcggttaacagcgaagttaacacataaacatagcgctaattatgttagcacaaaaaattctaaaatgcaaggtctttttcaaaaaaacagaaaacttttttctttttcttcccgaaagcatccgtttttttcgttaggcgccgatgtagcgaaggtattcttcgaggcaaaaggagagtctgcggatggcggcggcgtgctctgtgccgacatagcgcaggacaagatcattgcgtttaaggccggtttcgtcctcttttccggcgggatagcggaacacaaagccgtaatgcgccatatttctttgcagccagccgtaggtatccgttgtcgaaaacgttgcggggtcgtcctgcacggtgacgcacaggccgctttgcaggtcgcttgtgccgggcgcggacacggtggattttgcgtcttcgcgcgccataatcttggtggaacctgccgcgataaggcgctcgacttcggcgttataaagcgcttcctgctctgcataggacacatagccgccggaaaacctgagcgtgacaccgtctgcttttgcagcatcgcacagtgcggtgagtgccggcacaatgcgggcatcgaccgtgacgctgtcaaactcggcggtctcctcgggggcgaaatccgcgtccgcagggtggtcttcgttgatgacgaacagattcacgctgtcctcgagcacgggcaggtcgttttcctccgtgcttgcagcgggggacgcggtgggcagtacggtggcctgcggcagggaatcctccggatcttcgggcgggaaaagcaccggcaaaccccacatgacgaacagtgcaagcgccatgaaagcggcggcgcagataagcagaatgcccgtccaacgctttaggttcataatgcgctccaaatgcagcggacgcggcttttggatggggctgtatttttttcgtttccgcacggtgcgctcccctttctttcggtatcttttactattatatcggatgacgggaaaaaagcaagtcgaattcctttacaacagaaaaaacgcccgagccgtgaagcccgggcgctgtgcatttcagttcacgctattttttgaagaattacttctttttgcttttacgggaggggatctcggtggtttccgggtctacctttcccatttcggaagctgcgctgctaagaccgtcctcgccgctgctgagcttgccgttattgacgatgaggttcgtgacaatgccgacgatgagggcaacagccaaagacgtgatgttcagcagagcgccgccggtgatgctgttcgtgccgaagccgaagtacaaaccgccgatgccgcagacgaggatggagctgacgacgaacaggttcttactgttgccgagatcaacacggtggagcatctggagaccggaaacggcgatgaagccgtagagcgcgatgcacgcgccgcccatgacgcacttcggaatggagttgataagcacgacgaacggagtgaagaaggaaagcaccatgcagccgagtgccgcggtgaggatggaaacgacggaagcgttgccggtgatggcgatgcagccgatggactcgccgtaggtggtgtttgcacagccgccgaagaacgcgcccacaatggagccgaggccgtcgccgatgagggtcttatcgagacccgggtctgcgatgaggtcgcggttgacaaccgtgctgaggttcttgtggtcagcgatgtgctgtgcgagctcgacgacgccgatcggaatgtagatcatggcgatgttgccgatggcagccgcatcaagcggatactggccgttcgtctcgattgctttgaggaagaagaacttcggataatcgacgatgctggtgatgctgaatgtgccgaatgcatcgatgaacggctggaaggaaagaagcttgaggctctctgtgcccgttgccatgccgatgattgtaaagacgagtgcaagcgcatagcccgcgccgatgccgacgataaacggaatgagcttgacggttttggagcccttaacggacgctatgacaatcatgaagaaggtgaagatgccgcagatgatggcagcccagttgtaggtctcgccgtatacgacagctgcagcgccgttgcccatgatccagcttgttgccgtgccggagagggacagaccgatgagcgcgacgatcggcccgatgatgacggacggcatcagcttattgacccaaccggagccgacgaccttgatgacaagaccgatgatgacgtaaacaagacctgcgaacgcaacgccgatgagcatgccccagtagccgtaattctgaccgattgtagccgcatacgcgccgaggaaggtgaacgaggagccgaggaataccgggcttctgcgcttggtgcagaacaggtatacgatggtgccgatgcccgcgccgaacagtgcggctgcggcgtctgcctgcaggccgtagctggtgacaagcagcggtacgagcagtgtagccgccatgatggcgatcatctgctggaatgcgaagaccagtgttttgctgaacttcggcttatcttcgatgccgtaaatcaacttcatgaaatcatttcctttcttccgaaccgtggtttcatttcttaccccaaaacacgttctcttctcccctatgattttccgagcataaaaaaagctctgcctgtaaaatgggcagagcttgagccttgtcagcacgccgtctgtaaagacgtattaagagtcaatcttgccaatatcgcagtatcggggttaaagatcgtatttcgttttccaacactaaactatagcacaacattcgacgaaagtcaacgtaattcgcgcacttgtgaatagtttgtgaatattcatcaaaaaaggcagcacaagacagaaaaagctctccgaaccatgcgaagagcttttacgtttataaggatcaccggtttttattcggtttatagctgactgtgccgcacaggcgatcgcctgcgtcgccggctgcggtgggaatgtagccgttctcgttcagcgggccgggtgcgtagtttgccgcgtagattttgacatccgggtgcttttcatacagcagcttgatgcctacctcggacgcgaaaatgcacatgaacttgatgctcttgcagcctgcgtcctttaaaaactggatggccgcatctgcgctgccgcctgttgcaagcgccggatcaacaacgacgacggggccgtctgcggtatcgaccggaagcttaaagtaatacgtcatcggcttcagggtttcctcgtcgcggtaaaggccgatgtggccgacctttgccgtgggcgaaagctcacgcagaccgtctaccatgccgagaccggcgcgcagaatcggaacgatggtgaaatcctctgcaagcaccggggtaatgatcttctgcagcggcgcctggatctccacgtccttcgttttgagctccttgagtgtctcatagcccataagcatggcaagctctttgacgagttcgctgaattccttggtgccggtgttaacgtcgcacaggtggctgaccttgtgcttgatgagcgggtggttgaaaaccgtaagattggaaagatatgcttccatgtttgaccttccttagtccgtaagacggcgcaccgccttgtttcgtttattttcaaagagtatcatagcacacgctttgacaaaaatcaaccgaaagagacgcgtcttgacggaaaagcgccgaaatgctacaataaatcaaagagtttaaaaaaggattgacaagcatgcctatgaagctgaaagcccagctgatggacgacgttaccgtaaagcgcgccttaacgcggctttcttatgaaatcattgaaaaaagccgcgacctcgaaaacgtggtgctcatcggcatcaaaacgcgcggtgtgccgcttgcggagcagattgcggcgaacattgagacacacaccggtgtaaaggtgcaaacctgcacactggatattacattttaccgtgacgacctgacaaagcggcacgacctgccgactgtgaacacgcagacacttccggtcgacctcaacgacaaggaagtcattttggtggacgatgtgctgtttacgggccgcacggtgcgcgcagcgatcgacgcggtgttccgtttcgggcggccggcgcgcattcggctggtcgttttggtcgaccgcggtcaccgcgagctgcccattcgccctgattttgtgggtaagaatatccccacctctctacgcgagatcatcgccgtgcatttggaagctgtggacggcaagacgaacgtggaaatctacgagcaggacgagaacgaaccggaaatctgcgggcaatgacccgcttttagtgcaaaaatcaaatttaaagaaggtataaacatggctgtaattttggcaagcagctgccttttgggctgcgaatgccgctataagggcgacggctgcaagtgcgatgcgctcattaagcttgcagaaagcaacacgatcatcggcgtatgtcccgagcagatgggcggcctgcccacgccccgcgatccggcggagcggcagggtgacaaggtgatctcctgtgcaggcaaggacgtgacgaaggcgtacacaaaaggcgcagagacggcgctgtactttgcgaagctgaaccacgtggattttgccgtgatgaaggcgaaaagtccgtcctgcggcaagggactcatttacgatggcacgtttacgggcaacaagattcccggcaacggtgtaaccgtggagcttctgaacgcgaacggcatcccggtgtttacagaggacgaattggatcagctaccgctgtaaagcgaaacatcttaacataaagaattgggcctgctgcgctttgcggcgggctttttgcttgaagatataaagaaaagctgtgcgtaaagttttattgctttacgtacagctttttgagttttatgtaatgctattttgctttacagcttacttctcgtcgaagaacgctttgaagcccttgtaggccatgtagacatcgagcttggagacaacctcaaacggtgcgtgcatggaaagcaccggcacaccgatgtcgagcacgtcgacattgaggttcgcgatgaactttgcgaccgtgccgccgccgccctgatcgaccttgccaagctcgccgatctgccaaagcacgcctgcatcgtcaaacgtgcggcggattttggcgacgaactctgcgttcgcgtcggacgtaccgcccttgccgtgtgcgccggtgtacttggctatgcccagaccgccgttgatgtaggtggagttctgtgcctcgtaaacggaagcataatgcgggtcatatgccgcggtgacgtcggcggaaatgcaggtggacttggagagcacgtggcgcggctcttcgccctctgcctgcgcgaggtcagcgatgaagtaacgcatgtactcggagttgaggcccgtgttgccgtcgctgccggtctcttccttatcggtgagcacagtgacgacggtctgcaccgggttcttgcagttgaggatagcttcaagtgccgggtatgcgcaaacgcggtcatcgtggccgtaagcgccgacgaggctgcggtcaaagccgatatccaccgccttgaacgccgggacgaactcgatctctgcggagatgaggtcggcttctacgatgccgtacttctcgtttaagagacgcatgatgttcagcttatatgcatccttagcctcctcgtcgcgaaccgggcggctgccgatgaggatgttaaggtcttcgcctgtaaaggcagtacccagcggctttgtagcctgatcctgaccgaggtgcggcaaaatatctgtgatggtgaactgcggatcgcccgcttcttcaccgatgcagaccttgatgaccgtgccgtcgctcttcacgacaacgccgtgcatggcgagcggaatcgccgtccactggtactttttgatgccgccgtagtagtgcgttttgaggtacgccatctcggaggattcataaagcgggatgggctttaagtcgagacgcgggttatcgatgtgtgctgcggcaatgcgaacgccgtttttgcagccctctttacccatgatggcaaggcaaattgctttaccgcgattgttgtaatacactttgtcgcccgccgcatacttgtgcttcgggtcgaacggcacaaagccgtgcttttctgcagccgcgaccgcgtattcaacggattcgcgctcggttttggcgctgtttaaaaatgccttgtagccttcgcagaacttatctgctttttcaatcttctcatctgtgaccttgaaaaagccgttcttgcgcgggttgaggagcatttcggacagctcttttgcggatttttccgctgcttttttagccattttcaattcccccatacaatttttcgtaagtttctttatactgaaggactttctggacgtaaagacgcgtttcttcaaacggaatttcttttaaggtcactccgtcttcggaatatgcggggtccgaaagccacgacgtaacgtttcccatgcctgcattgtaggcgcagaccgctgtggcgaggttgtcgtactcgtttaaaagcacgcgcagcagcgcacagccgtatttgatgctgatttcggggtcgagcaaagcgtttgcgtcatattccccgccgatatgcgtttgcatccagtcaaacgtttcgggcatcatctgcataagcccgagcgcgccgaccggagactccgcctcggggtcgaaatcactttccgccttgatgacggcatagacaaggctttgcggcaagtcgtactccttcgcttcttttttgacgacggattcgtacttgcgcgggtaaagcatgtggtctacatcgggatgcagcctttgcaccgcgaaaacaacgagcacggcagctgcaatgccggcgataagaatccatggccacaagggcttctttttggacttttttaaatgtttgcttctcttattcaatcggattcaccggggtgtgcgcagccgagcactgcgagcatattatccatatcgtccgccgaaacagcgacggtgttatcgagtgtgtaatcggaacggtcgatgtaaaaatcgtcgctctgctgggcgtgcatgcgcgtcagggcctcctgctccgtgagaccgtcgcggcggcagatgcgcccaaggcgcacggtttcatccgcaagaacggagaccacgcggcggcaaaggcgatctgcaccggcttcaaacagcgtcggagcgtcgagcacgataacctttgcatctttatatgcggcaatctcctttttgagacgcgctaaaatcacgggatgcgtgatggcgttcagcttcgtcttgccctcttcgcttgcaaacgcgaggtttgcaagacggcggcgatctaaactgccgtcttcctttataatagcacggccgaacgcattttgcaactccgtaagacatgttcctgcataaagagacggatcgtgcgtaacggcgtcgcagtcgatgatgacgcagccgcgcgccttaagctgctttgcgaccgtcgatttgcccgcgccggtctggcccgtaaggccgatgacgagctgctcgttcggcgttacgatgcggaacgcacaagcgcggatgagacggttataaaccgcaaggcctacgccgcttttgcgcggcatacgggcgtaaacggtctttgcgccgatctcatcgaggtgatggagcgacgtgaaaagcccgtgcgcctgcgaaagggaatctgcggcgctgccgtagggcacgcaccggtttttgaggtacggcacatcttcgttaaagcaaagtgcagctgcttcggggtgcgtatgcaaaaacgcggcgtagtcttcggcggaagcgtccaccatgtagacatccgctttcggcgcgtagtgcttgtatttcatgccgggcgaggcgaccttggcgttttccgcgggcttttccagcacggcgcggtccacgtctaccctgccgagcacgcagcgcaactgctccacggaaatgccgcccgggcgcagcacgcgcggtatctcggtgacgacggtgataacggtggactccacgccgacctcgcagtcgccgccgttcacgatgccgtctacgcggcccatgagatcatcgcacacatgcgggaatgatgtggggctgggcaggccggagagattcgcggacggcgcggcaagcggcacgcctgcggcgttaatgatcgcccgcgcggtgggatcggacggcatgcggacggcaaccgtatcgagaccgccggtcgtctgcatcggcacaagcggcgattttttcatgatgatggtaagcgggcccggccaaaaggcatctgcaagctttttggcagcttcgggaatctcttcgacaagcgcaggcaattctttgatatccgcgatatgcacgatgagcggattatccgacgggcgacccttcactttgtagatctgtgcggagacggtagggtccagcgcattgccggcgaggccgtagacggtctccgtagggatagcgacaaggccgccgcggcgcagaatcttccccgcttcttttatatcctgttcgtttttttcatccaataatcgcgtatccattttcatccgttctccatgctctctttcaatttttcggcgcggtctgcggcgatgagtgcgtcaatgatttcatcgaggtcgccgtttaagacgtcgaacaggcggtagattgtcaggcctatgcggtgatcggtcacgcgcaactgcgggtagttgtaggtgcggatgcgctccgaacggtcgccggtgccgacctgacttttgcggtttgcggcaatctcggcgttttgcgccgccaccttagcgtctaacagtcgggcacgcaggacgcgcagggctttatctttgtttttgtactggctgcgctcgtcctggcactcgacgaccgtgccggtgggcaggtgcgtaacacggatggcagacgacgttttgttgatgtgctgcccgcccgcgccgctggagcggaatgtgtcaatctttaaatctttcgggtcaatctcgagctcgacctcatcggcttccggcaaaacggcgaccgtggcggtgcttgtgtggatgcggccctgcgtttccgtttccggcacgcgctgcacgcggtgcacgccgctttcaaattttaatctggaatacgcgccgtcaccgtcgattgtgaagctgacttccttaaagccgccaagctccgtttcattcaggctgacgatctccgttttccagccgcgcttttcggcgtacatgttgtacatgcggtaaaggttataggcgaacagtgccgcttcctcgccgcctgcgccgccgcgaatttccacgataacactgcggtcgtcgttggggtcgcggggcaataataaaattttgagctcttccgagatgctttcgatatcgcttttggcggcgctcatctcgtcgctcgccatttggcgcagctctttatcggcttcggagtcgtttaaaatcgcttcggcatcctcgagcgacgcttcggccttttttaaggcgcggtatttttccacgatgggttcgatttctttgtgctccttcatgaggtcgcggtagagattgcggtctgccgcaacggcgggatcatagagcttcatattaagctcttcatatcggttttcaaaaaccgagagattttcaaacatagcaaagcttcctttcagacagatagtaaaatgaaacggtctgagaggcgctactgctcgctgccggcactttcgcgcacgatcttgcgaatgttcttttcacacttgtggcggggcaccatgacttctctgccgcagccggtgcagcggattttaaaatccgcgccgatgcgcagcacttcaaacacgtttgtcccgcaggggtgcggctttttcatttgtaatttgtcgcctacccgaacatccatggtacagcctcctttatcgtgtattgggcgcgaatgctcccttgaaaattcagtatagcacaatgctgtattgatgtcaaagcaaaagaccgcctgcgcgggactttcccttgcagacggccttttcggtttctattttattccaaacgctttgtgaaaacgcttttacgctgcgatgtgaatgccgctcttcttcagcgcgaaactaagggcggtcgctacgccgtaagccgccgcaacggagacgatgtccttgacgagatacggcacggaggccacaaggaacgccgcccacgggccgttgccggagataatgccgaactgaatcgtgccgcacagatggcaagccgcaagacccgcaacaccgagtacaatggcaagcacacggtgcggcatttttgtgccgagaccgcacagcgcagccatgggcaggaagccgtagatgtagccgcccgcgagaccgacaagcgaaccgaaaccgccggagaagtttgcaaacaccggcagaccgacagcgccgagcacgatatagacgagcacggcgagcgtgccgcgcttacagccgagtgcatagccgcacagggcgaccgcgaaggtctgtaaggtgaccgggatgccgctcggcagcgggaacgaaatctgcgacaaaacggcaagcacggcggcgaatacgccgaccatgacgatattggtgattttctctctgttgctgttcatgttatttacccctattcatttcggaatacggcacactaagcagtttattcggctttcgggtttgcaaagcccttgtggatctgcacctcgcctgcggagaacgcgcgctcctctccgctatcgagacggacgagcaggtgcgcttcgtcgctgatgccggtgacgacaccgcggtacgtctcctccccgagcgagaacgtgatggcgcggccggtgaggaacgaatggctgcggtacgattcgatgaacgcgtttgagccgaggttcttatacagcgcgaaaaagcggctgatgacggcagccgaaatgcggctgcgcatctccacggggcacgggccgtcgaaaatagcaccggcgatggagcgaatctcctccgggaagccctcttccggcacagcgatgttgatgccgatgccgagcacggcccagttgagaccgccgttttcaaaatcaacggaagcttccgttaaaatgccgcagacctttttctcgttgaggtaaacatcgttcacccatttgatttgcgggtttagccccgtgacctgttcaatggcttcgcacacggcgaccgctgcggtagtcgtgatgaaaagcgatttttcagcggtgcagtgcgggcggagcagcaggctgaaataaatacctgtacccggcggcgatgtgaagtgccgaccgagcctgcccttgcctgccgtctgcgattccgcaatgagcacggtgccctccggcgcgccctgctccgcctgtgcctttaaaagcgtattggtggaggtgacttcagtctgcacctgcaagtaaaccggcatatcggtatcgaggaaccgtgagacactctgcacggtgagcacatcgctttccggcgccagcgtatagccgcgttttggcacggcgcgaattttatggccggcttcttcaagcttttggatggctttccacacggcattgcgggaaacgccgagcgacgacgcaagctgctcgccggagaggtattctccgcgatttttttcaagtgcgtctaaaactgcatcttgtatgcgcataaatttcctttccggcaaaaccggcagcgaaaatttcgtctaccagtttaccacacacaaagcgtttcgtcaacctaaaattagaattaaggtgacgaataacaaaacaccgattgaatggaaaagcaaaagcccgcacagcgcatggttttgctctgtgcggacaactattccattacttctttttcttgaagccgtccttcagcgaaacggagcggttgaagacaaggtggtcttctgcggaatccttgttatccacgcagaaatagccctgacgcatgaactggaagctctcgcccggctttgcggttttaaggcccgcttccaccttgcagcccgtgaggaccttgagggaatccgggtttaaaagctctaagaaatcgcctgcatccgggtcttccacagtaaagaggttatcgtagaggcgaatttcggcgtcttcggcgttcttcgcgtccacccagtggatcgtgctcttgatcttgcggccgtctgccgggttgccgccgcgggactcggggtcatactccgcgtagacctcgacgacgttgccgttttcgtcctttttgcagccggtacatttgacaacataagtggtcttgaggcgcacttcatttcccgggaaaaggcggaaatagccctttacaggggtctccatgaagtcttcggcttcaatgtacagctcgcggccgaacgtaaccgtgcgggtaccgtcttcgggacggttcggattgttttcaacctcgaacgtctcgatcctatcttcgggatagttcgtcaaaatgagctttacggggttcagaacgcccatgacgcgctttgccgtgaggttcaggtcttcgcgcaggcagtgctcgagaaagctgtattccacggtagagttcaccttggaaacaccgttgcgcacgctgaaattgcgaatggaggccggggtgtagccgcggcggcgcaggccgcagatggtgggcattctcgggtcgtcccagccgctgacataaccgccttcgacgagtgcgcgcagcttgcgtttgctcatgaccgtgttgttgatgccgaggcgggcaaactcgatctgacgcggctttgcgggcagcgtgacgttgttgataacccaatcgtacagcggacggtgatcctcaaattccaacgaacacagcgagtgcgtgatgtgctccatggcgtcctcgatggggtgcgcgaagtcgtacatcgggtagatacaccatttggtaccggtgcgatggtgcggcatgtggttgatgcggtagatgaccgggtcgcgcatattgaagttgccggaagcgaggtcaatctttgcgcggagcgtcattctgccgtcttcaaactcgccggcgcgcatgcgggcaaacaggtcgagactctcctccatcgggcggtcacggtacgggctctgcgccggggtggtgaggtcgccgcgcatttcacgcatctggtcaggcgtgagctcgcaaacataggcaaggccctttttgatgagctctacggcgccgttgtacatatcttcaaaataatcggaagcataatagaagcggtcttcccaatcgtagccgagccagtggatatcttccttgatggcatcgacgtactccacgtcttcctttgtggggttcgtgtcgtccatgcgcaggttacagatgccgttaaagcgctctgcggtgccgaaatcgacgtagatcgccttggcgtggccgatgtgcaggtagccgttcggctccggcgggaaacgggtgtgcaccttcatgccttcgcagcggccgccctctgcgaggtcttctataataaaatcatcgataaaactgctgctgatctcctcggagaccgcttcgtttttgatctcttcactcataatttgtccatacctttcctaatatcaggtttttcctcttgctttatgcgttctcgatcttttgaaggccgagctgtaaacggcgcagcgcctcctctttgccgagcacggcgagaatttccatagcgccgccgggggtaacggtctggcctgccgccgcgatgcgtaccggccacagcaaagtgccgtttttcacttcgaggctctgtgcgagggcaatgagtgcatcgtggatggtatcaacctgccagttttcaatggcggacagcgtctcgatggcggcacgcagcatgacgggcgcgttctcgagcgttgccttgctctttttgtttatgaagaggtctgcggaatattccggaagctctttgaagaagccgagcaggctcgggatttccttaaacttcaaaatacgcggctgcaaaatggcgtcgagcacgtcgtatggcttttctgcgtcgccaaaaatctctttatagtacggcatcgccgcggtgcggaactcttccccgctcatcttgcggatgtattcgccgttgaaccacaggagcttatcgtaatcgaacacggcgggcgatttgctgatgccgtcgatggagaatgcttcttcgagctctttcagcgagaaaatttcctggttatccttcgggcaccagccgagcagcgcgatgtagttcgtgatgaccggtgcgaggtagccgtcttcgaggaggccctgaaagcttgtggaaccgtggcgcttcgaaagctttgagacggagccgtcttcgtttttgcccatgatgagcggcaggtgcacataaatcggcttttcccagccgaacgcgtcgtagagcatgttgtacttcggtgtagaggtgaggtactcgcagccgcgcacgacatgcgtaatgtgcatgaggtggtcgtcgatgacgtttgcaaagttgtaggtcgggtagccgtcggactttaaaagcacctgatcttcgatctctttgttttcgatcgtgatggtgccgtaaacggcgtcttcaaaggacgtggagccctcgagcggcacacgctgacgaatgacatacggcataccggcgtcaaggttcttctggatttcctctgcgggcaggtcgcggcaatgacggtcgtagccgccgaactcgccgtcctgatgaatggactcgaggcgctctttggtgcagaagcaatagtatgccttgccctcgcgcacaagctgctctgcgtagggtttataaatatccttgcgttcgctctgtacatacgggccgtattcgccgccgatgtccggtccttcgtcatgctgcagaccgacttgctgcagtgtattatatataacgtctgttgcgccttctacatagcgctcctgatctgtgtcttcaattctgagcacaaacgtgccgttttgggacttcgccaccagatactcgtacagcgccgttctgaggtttccgacgtgcatgaaaccggtggggctcggcgcaaagcgtgtgcgaaccattaaaacaacctccttggtttttcggtgcgttgctatccatgccgccggcatgaaaaaatactacaccatcatataatgttctattatatatctgtgcgcaaaattttgcaataaaaaaacgggaaaaagcgccatctttttcccgttttctgttcttaattgcccttgaggaacgccacgtactcttcaaggcacatgttaagctcgttcatgcgctgcgcgtgctccttgccgacgtagcggtaatgccacggctcgtaatcgatgccggtgatgctctccttgcccttggggtagcgctcgacaaagccgtattctgcggcgtgctcctgcagccatgtgtaggcttccgtctcgcggaaatcgtcttcaacatcgttgaaatcgaccgcaaggccggtgtgatgctcgctgtaccccggcgcctgaatggtgatccgcgcgtcttcatacgctttttcataggtcatgccgtctgccatgcggcgctgcacggcgcgatccagcacgctttcctgctcctccacgctgcgatagcccgaggcaatccacaaattgatctcgtcgttatacgctgcattgataagcgccgtgagctccgggtacattttggagttgacggtgatggtatcgaacagcgtcggggtcatttggaaatcgtccggcagcggcacttcgctgttcacaagcacaagccgccaatcgccgagctgctgaaaggcagattcgggagcggaggtcgttttagaaagcacacttgctttgtctgaaatgttctccgcagcggtgctcggtgccgcttccggcgaggcagcagcttctatgggctctgcattttgatgcggcatggcaagcagcgctgtgatgatcagcacagccgcaatgcaccctgccccactaagcaaaagccgtgcacgcgatttcagtatacgtgcgggaatcctgttatgcttcttccgtttttgcggctgttttaatctgtaatgtccaccttgcggccccgccatgtgctttgccacgttcatgctcccttttctttcgtatcttctattgcaagtataccacataactggtatactaatccatagtttctaaattgttttttcatctttttttcattttgaaggagtgaccttgatgaaaaggatctttatgcgcggcaaccccggcgattttgcaaattatgtggcggcgctgacggcttgcggcgcggagccggtaatctcgatgacactttccgacgcagacacttgcgacggcttgctgatccccggcggcgccgatgtaaatcctgcgctctatgggcaggaaaacacggcgagcgaaggcatcgatgacagccgtgatgcagacgagattgcgcttgcaaaatgcttttttgcagcgggcaagccggtattcggcatttgcagagggcatcaggtgctgaacgtggcattcggcggcgatctcattcaggatgtgccggacccgcagcaccacatggcgacaaaagagaacggcgacgccattcacacggtacgcgcgcagcatgatctgatgcgcgaattttacggcgaagaattccccgtgaacagtgcacaccatcaggccgcaggtaagctcggcgcgggacttatccccctatgcgtcagcgacgacggcatcaacgagggctttatccatgaaaacggcaaggtgatcggcgtgcagtttcacccggagcgcatcggctttgcgcaccgccgccccgatgcagtgaacggcgaaaagctgtttctctattttctgagtctgatttaaagccgcttttctctattttccgcttccgcataaaattgtgaaaaaactgcttgcttttttcccgggcatcgtgtataataaattcgttatccgggtgtagcgcagttttggtagcgcgcttgaatggggttcaagaggccgcaggttcaactcctgtcactcggaccataactggacatcaattttgatacaacacgtatcttgattggtgtcctgttcctttattacagaggttttggtttccatgggtctttaccatacgatttaatcatcttttttcgcagaaatcctttccggtggaaaatattgcagagaccttcggtgatgaactccgatgtttattttcaccatgtatttgttctattcaaagataaagcagggattttaatgaagcaaaacaaaaacggattcacattgatggaaatgctaattgtcattgcaatcatcgccgtattgattgcagttgcaattccggtatttgcgtcacagcttgaaaaagccagagaagcgacagatcttgcaaatgtccgctccgcttatgcacaggtgtccacagaggcgttgctcggagattctgagactaccgtaaccgtcaacctaaaacagaagcaggccgactggcaatcagtagatcctgtgaatatcggcggtattgttcattccaaaagccaaggagacacggctaactggataggcgttgctgcgccaaacggaacctgtgtcgtatcgtataaggaagattacggaatcattctcaattggagcggaaaagccgacccatctacaactaaatacccgtttaacacaaacgtaacggatttcttcccacttctatacaatacggatttttggaaaaacggcagcataaaaaccaatacaaactttgagtttgactccagatgtccggattcgcaatatgttccatccattaccgcagcgattaaagaactggataacagtcttttgcagcagcctgattgcacatgggcttatctcggtagcggaaaagacggacaagaagcaaatcggtatcttttctggacatctctggacacggataaggtcgggcccggaaataaaatccccgtaattattcaaaccggtgacaagagatattatgtttccgaaaccacgaccggtacgcgaaaaggcaagaagtatgtcaccatctcggaatcgcttactacgcaaaatcagtataaggaaattctgaacaaaggaaaagagttttctacgttggaagatgcttacgatgcctaccttaaagcattgggtgattccaaatacgattccgtacgccagtccaagtcttaaaatgctctattccgttacaacctctaaatcagcattctcagcaacttcatcaaatacaaaaagagacagcctaaagtgatatgcccccataccgggcgtccagtattggggtacatatcaaagcggactgtctcttttttacttgattgattatgtagttatactgcctgcaagcggtatttttccgcgtaggtgccgtaggcgcggcgaaagtcggggtcgtcggcacgcatggcgcgcagcgtttcgtgcagattaaggccgtggtttgccgcatccagaacacagccggcgatgttggagcagtggtcagccgttcgctcgagatccgtcagcaggtcggaccacacgaagcccgcttcaatactgcaataaccctgctgcatgcgcagaatatggcgcgtgcgcatctgctccttcagtgcaacgatgacctgtttcagcggctctacctgtgcggcggccgcaaggtctttttcgctgaacgcgcgctctgccgtattcaatatctcactcaccgcgccgatgagcaccttcagctctttttctgcggtggcgctgaagccaagtcccttgctgcgcagttcttccgatgccgcaagcaggttcacggcgtggtcggagatacgctcaaaatcgccgataatttttaataattcggtggcttcttcgctttcggcatcgctcagctgctgggcgctcaggcgcaccaggtatgtaccaagctcgtcttcgtagcggtcgcagcggctctcgttttcacggatggattccgcaagctccggcgaataattctcaaaagtcgtcagcgccatatgcagcgcttcgcctgcgcagcgtgccatttcgcccgcaacggcacggcagcggccgagcgcgacggacggtgtgatgagcagacgttcttcaagctcaacaggctgctctttgccgcccttatccggcacgatgcggattgcgagcttttcaagcaggccgcctgccggcagcagcatcgccgtgcacaggatattaaagagcgagtgcgcaatcgcgatgccggacatggtggcgttttcatccagaatagccggtgcaaacacgatctttacaatccagaaggctgtcagtaacacgaccacgccgataacgttgaacatcaaatggacaactgccgcgcgctttgcgttcttctgtgtgcccacggaggagatcagcgccgtaacgcaggtaccgatattctggcccatgataatcgggatagccgccgcgtagctgacctgccccgttacggccaatgcctgcaaaatgcccacggaagctgagctggactggatgatacctgtcaaaagcgcgcccgcaagcacgccaagaatcggatttttgaacatcaggaacagcgaagcgaacgccgggacatctttaaggcccgaaaccgcgccactcatggtttccatgccaaacatcaaggtcgcaaagccgagcaggatcatgccggtatctttctttttaccggacttgcagaacatatagaaaatgatgccgatgagcgccaaaacaggcgtgaaggatgacggctttaaaagattcacccaaatattgctgccactgatgcccgcaaggctcaacagccacgccgtgacggtggtgcccacgttcgcgcccatgataacgttgatggcttgccgcagtgtcatgagcccggagtttacgaagcccactaccatgactgtcgtcgccgacgagctttgaatgatggctgtgatgccgaggcccgtcaaaaagcccgccggtacactgccggtcattttatcgagcaagctttgcagcttgccgcccgcgcggcgctccaaggcctgccccatcaggttcatgccgaacaggaaaagacacagcccgccgatcatcgtcagtacattgaaaatatccatacccgattttccccttttaacattcttttacacgtataggagtatatcgtgtctatgtcaaatcaactgtgtgttctttgtaaaatccatgtaaaatcgcttgttaaaaaacgacacaaagcatgaatatcccccggcgaaaagccggaggatatctacgctatgcgtcctgctgaattttgctttacacggtgccggtgataacaacctccgcggtgccgggtgtagtggcccatgtgccgttttcgttttgcgtatactgcgcggcgggaacggtgatctgccccggaagcgtcgcgaacacgccggtcgtttcgccatacgtgtactgcgtacctgctgtccaagcggtgccgttaaacgtgaccgcaacgtttttgaggatcgggtcaaacgtatcggtcagcacgatgcgctcggcttcggaagcttcggtgttgcccgtgttttcgatgacgaacgtatacgtaatctgcccgttccccgtgacgaccgcaggacacagcgctttgctgatggtgagcaccgcgcgatcatccgtggagaccgtttccgacgcgctgacttccagattgccgtccgtgacatttgcggtattcgtgatgctaccgtccgtgccgagcggtgcatacgctgtgacctctgcctcgtaaacgagcatgatgctgccgtttgcggggacattcgggaccgtaatgacgagcggcggctccggcgttgcggtgggcgcggtctgcaagacgccgtttacataataccgaacagaattcggcacatacgcgagcggatagacggttccgctattaaattcatacgcgccgaggttatcggtgaccgtgagatttgtcaccggctgcgcaccgctgtttacgatagaaatgatatacgtaatcttatcgtttgcggcgtaatttttcaccacggcagttttggtaacggtcaaggcctccaaaagctcgcccgtgacggtgttggaattcgttgtgcctccgttatacgaaagcgtcgcgaaatttgtaaaagatgccataaaacccctccttgttttccggggacttgccccttgtacaagttatgccgaagggggtttaaatgacacttttgagcttgtggctttttgcattcttcatgtctttttaaggaacctcttgatagggtttcttacggctaaacagcccaccggaccggttagcctatcttcctgatctgttgtgaggcaaaaggatttcgagctctgcggaggtcgtgggcgagcccggcgtgctgcgcatgcagccggaaccggtgcgtgcggcctgtgaacgcgaactcgacaaatttctttaatttcacataatttagtttacataaggttattgacataatcagatttcgatccattaaaaatctcctttgaagaacccataaaaccgggcttcaaaggagattttcgttttgttattggccgagcagcgaaagattatagtcttccatgcacgtcgcaaggccttcggcagtcgtctcaaatccaccgccggcgtttttgagctttgcacaattcatccagaggttttcgccgccggacttttcctgcaaattgagattcatgcctgtttttttcataaacagctccgcaagcgcgtacatggagacgtctgcctcgctgccgaagttatacgcgccaccgggcaaattcacagcctgcaaggtctgctctgcaacctcgcgcacataggtgatgccgcgaaattcctctttggaaagtgcaagcggcttttgggtgatggcggcgttcaggaacatcgtgatgaggttgctgcggttcggcacgccgaacatgggcatgtcatacatccacgtcgcacgcagcatgacggcgttcgggtcgatcgcgagaacgcggttttccatttccaacttctcttcggcgtagagatttgcggtcgcaacgtcgtcttccgtaaacggcttatcgccctttgcgccgctgtacacctgatcggagctgaacaacacgagcttcgcaccgtttgcggctttggccaaatactccggcaccaaaacgtttgcgtggtacgatccttccgggtctttggcacacgcaccgatgtccgagattgccgcggtgtgaaggatggcatccggctgcacggtgtcaatgaggcggtcgatatcctctttttccgcccccacaaagccatttgcgccggtcaacagaattttcatgataaactcctccctggttttaaaaacgacccgacaaaactgccgggtcgtctggatgcaaaatgaattatgcgttttcggtctctttgtagcggcgtgcgcagtcctgcacgatggcgttcatcgcgtccattttattcagcatgtcctttgcaagggcaatctggcagcgcgtacggacaaggttatgctgcggctttttgaccttaaagtacttatcgccgacgatgtagtccgcgaggaagcgcgttgcaagctcgcaggtaagcgcaaagcagctgagcgccagcgtatccacttcggttttcgtcagagacgcggcggtctttttgaggaagccctcggcaaatgcccagaaaatattgaggtttacgccggccttttccggatgatcgcaatcttcttccacaaaatttgcagcaaagcggatggcatcgccgaaatcgtggccgacaagacccggcataacggtatcgagatcgatgacaacgagcgcctcgtgcgtcttctcatcgaacagcacgttgttgatctttgtatcgttgtgcgtaacgcgcagcggaagctcacctttttcaaagaggtcggtcaggcggcaagcctcgtcctctacggaaagcagccaatcgagttcttcgcgcacctctgccacacgattgcacgggtcggccgccatatcttccttcagtttctcgtagcgcttgcgcgtgttgtggaagtccgggatcgtgtagaaaagggagttcgcatcgaaatccgccaacatcagttggaaatcgccgaacgcctcacctgcactgcgcaccacgttcaggtcgtcgcaggtatcgaacgtcacagacggcacgtagttgctgagccgccagaagccgtcattatccatcaaatagttgacgccgtgcttcgtgtgatggaaatgcaggcttttcgtattcgggcatttttcgcggatgtgctccgtgacacggtcaatgttctgcatcaactcaatcgggtgctggaacgcatatgtattgacgcactgtacaaggaaagacttaatctttgccatgccggtaccgtcatcgcgaatataattgactttgtaggtgtggttcacgttgcccattttaatctcttcgtacgagaagaacgggccttcaatgcggaattcttcgccgacctcgagtaactttcgggcgatctccgggttcatgtccatttctggaatactcataatcctctgctcctttaattttctggcagtttggccgccactttttaagcataaacataaagggataactgtaaagattatagcagaaatacggcaaatttcaagccgaaattataaataggcgcaaaaaggccgtttttcttcaaaaatgatatactgccgactatttttttgactgcatgacctctcaaaagcacaaacaaaaaaggactctgcatctctgcaaagtccttcttggagctgctaaccagattcgaactggtgacctcgtccttaccaaggacgtgctctgcctactgagccatagcagcatacgcaaaaggcaagataaactcgccttttgtggcgacccggaacgggctcgaaccgtcgacctctagcgtgacaggctagcgttctaaccaactgaactaccgggccatggtggcaggggcagtaagattcgaactcacggcacgcggttttggagaccgctgctctaccaactgagctatgcccctatttatctcgcggcctcttttcgaccgctcgattattctaccacgaactacggaaaatgtcaacctattttcccaaaaataattattttttacccccgacaaggtgctttatgcaaaaaatgcagacaccgtgccgaaaaacagaaaacgcccgtccttttggaacaggcgtttcggtgactaaactttagcgggaaagatcctgagagatcctgtagagcttctcgtcgaagacgcgcggcatctcgagggcttcggtaatgtcgaagtctacgatgcgttcgccctgcatgacgacgacgcggttgctcttgccgtcgcggagcagctcaactgcgtggtagcccatccggcttgccacaacacggtcgcggagcgtcggggaaccgccgcgctgtacatggccaaggatggtcgcacggctctcgatgccggtctcctcttggatgcgcttgcagatatcttcggagtgacctacgccctctgcaacgaccacgatgaaatggcgcttgccggtcttctgtgcgtagcggatgcgctcgatgacgtccttttcaaagtcatactgcacttccgggacgagcgttgcgattgcgccgacagcgatgccggtgttgagtgcgatgtcgccgcagcgtctgcccatgacctctacaacgctgcagcggtcgtgagactctgtggtatcgcggatgcggtcgatcatttccatagcggtgttcatcgccgtgtcataaccgatggtatactcggagctcgaaatatcgttatcgatggtgcccggaacgccgatgcaaggaacgcctgcgccggtcaggtcgcgtgcgccgcggaaagaaccgtcgccgccgacgacgaccacgccgtcgatgcccagttcgcgacatttagcagccgccttctgaacgccctccggggtattgaactcggggctgcgcgccgtaaagagcgccgtaccgccgtgctggatgatgttggaaacgctgcgaagctccattttctgcacttcgccggtcagaagaccgttgtagccgtgacgtacgccatatacctccatgtcgaaggagatcgcggtgcggacaacagcacgaaccgcagcattcatgcccggtgcgtcaccgccgctcgtaagtactgcgattttctttgcacacattgtaaattcctccactttcttattgaaaattgcaaagttaaaaatgcaattcagcaatttattccattcatttttgattataccccttttccctgacggtttcaagaggtattttgtcttttttgaaccggtttttgtttttttgagaatttcttattctttcagcgcaacatttccctcgccgagaagttttttcaatgcggagacgagttcgtagttcaccgcaacgcggtaacgggcgggcgcgcggaccagctttttcgtgtccgtataatatagatagaggtcggtcacgccgtcgaaaatctcgatgtactgcatcgcctttttgcagagcgggtcttcggcgttcggcacacgcaggtaaaggcccttataggctgtgttatagcctttaatctgcacaccgggtcgctcttccccgcgcggcggcgtgacgctttccggcacagcggcaggcttttgcgaggcccttttcttttcctccggcgcaggccttctgcggatcatcatttcttccggcgaaaacggtgccgaggcatattcgcagatgaacttcgggtctttttcttccgtaaagctgatgcgtccgtgcgcccaaacagagccgcccggcgcaaaaaggtcgccgtatttttccaaaaccttcgggaaaacaagcgcctccatagagccgtacatgtcttccagcgtgacgaacgccatggcagagccggagcgcgtcaccttctttttcacgctttccacaacggccagaacgtccacatactgctcgtctttatattggtcggattccccggcggcgctgcgggcaatctcatcaaagcgcgcggcgatgccggcgttatagacctccgcatacggcgacatggggtgcccggaaaggtacatgccggtgacttccttttccatagaaagcagttcggttttggggaactcctcggctttcggcatctcgaaagattccgttttctcctccccgccgaagtcaaacaggccgatctgtccctctatgttgcggcgtttgtcgtcctccagctgatcgagcagcgggccgaccgccatcagcatttcgcggcggttgttgccgagaccgtcgaacgcaccgcagcggataagactttccacggcgcggcggttcaggtctctgccctgcatgcgcttgcagaaatcgtagaaggtcgtgaacgggccgttcatcgtacgctcggataaaatgcgctgtatcaggccgcgtccgaggttgcggatggcgagcaaaccgaaacgaatgctgttttcaaaaacggaaaagccctgctcgctctcgttcacgtgcggcggcagcacggcaatattcagcctgctgcattcttccatatacgccgcaatcttgcctgcggatgcgagcacacttgtgagcaacgcggccatatattctttcggatagtgatatttgaggtacgccgtgcgatacgccacaacggcatacgcggcggcatgggacttattgaacgcgtaggacgcgaagcttttcatctcatcgtagatcgtctcggcggtctgctcgtccacgccgcgggcgatgcagccttcaatctccacggtgccgtcctcacgctttaagccgtgaatgaaatactcgcgctcctgttccatgacatcgtgctttttcttgctcatggcgcggcgcacaatgtccgcgcggccgagcgaataccccgcaagctcgcggaaaatgcgcatgacctgctcctgataaatgatgcacccgtaggtgacatccagtattttggaaaggcgcgggtggcggtacgtgattttatccgggtgcttgcgattttcgacgtacatggggatgaacttcatcgggccggggcgatacaaagagataacggcgatgagatcttcaatgcttttggggtcggattgcatgatgacacggcgcataccggcggattcaaactggaacacgccctctgtcgcaccgctcgcgatcattttaaacacgtccgggtcgttatccggcgcgttttccaccttaaagcccggcgtgtgtttcgcaatcatctgctcggcgtggtcgataaccgagaggttgcgcaggccaagaaagtccatcttgagcagaccgagctgctcgatggccgtcatcgtgtactgcgtgacaggcgaatcgtcgttcatgctca

SEQ ID NO: 4556 - DNA, 6449 bp, Unknown
  16S sequences of unknown bacteria
gaggaagccggctggggcaagatgttcctggcccgggacggctacttcgacgatctggatgcctgctatacctggcacccgggtgtaggcaatatggtacagggtaccagcagcctggcaaatatgtgtgctttcttcaccttcaagggacgcaccagccatgcggcagcatcgccgcatctgggacgcagcgccctggatgcctgcgaactgatgaacgtgggcgtcaactacctgcgtgagcatgtgatccccgaggcccgcatccattatgcctatcaggatgtcggcggcgcggctcccaacgtggtacaggatcacgcccagctcaagtactttatccgtgcgcccaagatcacccaggtcaaggagatcggtgagcgggtcaaggatattgcccgcggcgcagccctgatgaccggtaccgaagtggacatctatttcagcgccggcatgtgcgactatgtgcccaatgatgtgctcagtgagattctctccgaagccctggtagcagtgggcggaccgaagtttgacgatgcggaccgggaactggcaaagaagttctttgacctctacacacccagcgagatcgaagcagccctcaagcggctctcctataactatgagaactgggaggactaccgcactattccgctggttgaggaagttggtccctataagaagacctcggcctatggattcggctccactgacgtgggtgacgccagctatgcggctcccacagctcagatgaatgtcgccacctatgctaacggtacaccgggtcactcctggaatgtaacagcacaggtgaactcctccattacccataaggcactggtaacggttgccgaggccctgtcgctggcctgcatcctgaccattgagcgtcccgaggccgtcaaggcagcccgggaagagtatatcaagagcaccggcggcaagtatatctgcccggttggtatggatgccaagcccgaactggaacatgtataatcccattttcctgatcctccgatgatgaaaaaacagcccgaagctgcatgtgagcttcgggctgtttgcatattgcggatggattgtggggaaggggatcagatgacgtggatcttcttccagctgccgcgccagtagcgccacaggaagcagaccgcacggacgatccagtcgcagaacatggcgagccagacgcccagcaggccgagtccgaggccccaggagcaggcaaacacatagctgagtgccacacggcagacaaacatggtagtcagggaaaccaccatggtaaagacagcgtcaccggcagcacgcagggagttgggcagggtaaaggccatgggccagaacagcatgttggcgatggcgcagagcttgagcacctgggaggccattgccatggcttcagggctgaggttaaagagcgttaccaggaagtcggcggagaagaagagcgcgctgcccatgatgagcatgctcaggtagctgcagcccaccagcagcttggtatagtggactgcctgacgggtatcgccggcgccgatgcagcgtccgatgacggtgataatggccagacccatggcagagccgggtacgttgataacgccgctgatgctgttggcaatggcattggcagccacagccgaggtgccgaaggtggtgatgaggttgagcaccatgagcttaccggcctggaacataccgttttccataccggtggggatgccgatgaacagaatccggcggatcatgctgccattgaattcgaagtggaagatgtcgtccacttgaacggtgaggccggggtgccggagcatcaccatgatgatgacagcggcggcaatacgggaaaccagggtaccgatacccgcaccggcagcgcccatgccgaatccgaagatgaggatggcattgacgaggatattgatgacgttgatgataaaggagttgatcatcgaaaccttgctgttgcccatggcgcggaacagagcagcgccggcattatagatgcccatgaaggggtaggccgcagcggtgagcaggaagtagacgagagcgctgtccatgacagcgggctctacctgaccgaagataagggagagaatatgctgacggaagatcagagccaggatcatcagcaccgccgaaatgccagtcatggcatagaggagctgtttggcagcggtcttggcgctgtgggtttcctggcggcccagatactgtgctactacaacggcgccgccggtggagagagccgagaagatctggataatcagggtattgatgttgtccaccagggaaacgccggaaacagtagcttcgccggcggtggtaaccatgacggtatcagccataccaacggtcatcagcaggagctgttcgatgatcagcggtacgatcaggcggatcagggcatcacggctgaacaagagattggaacgatccagagcctgggtctgttcggtcatatagttccctcctcgaaaaatgtagaaagtataaccatttttataacaaactatattatactcctgaaaaagaaaaacgcaagtgcaattttaccattgtcaagcacttgcgtttgtatattatgtataatctaagtaaaatttccagccaatcccattggcaaaatcagagggagatctcctcaccggggcgtaccagcagagcggactttactgtaaaggctttagccttgtcgtcatcgtagagatcgcccggcttcatgtggatgggaatggtgtgtctggctccgatcaggtcagcacattccatggcctcctccagccccatattgtagaaaccgtccgtggggagcagggcatagtcgattcccagctccgccatggatgccatatagtcggtgcgggaggtatcgccggaggcatagatcagcacaccgtccacccggatcaggtatcccacgcactcggagatggggtggttcttgttgcaggcgggaacggctgtgactgtgatgccgtccatctccactgtgcggtactcaccgttcaccagcatatctcctgaacggtgcaggatggtgtccggcttcatggtgagcagctccagcttgttgtggtcgtagtgctcatgggtgatgaggacgatgtcagccggcttgtcataaccctcaccggcataggggtccacatagagaacccgtccatcgtctgcggtgatgcggtagcttccgtgtccctgatagagcagttttgccatagtttcattctcccttcatcggtttattggggtgtcaaaggcttctggcccagtttgtcagtgcttccagatcctgatcgttcggacggtccaggacagcatcgaagttttccagcagcatttttgcccggctgtcttcgggattggcctccagcatggcctcataccggcggcggatgcccattcccatcttgcccgggcacatgaaaccgcccaggtaccggcagtccgcaggcaggtgttcctttactcggcccaggatcgcttcaaagtaggcgtcctccttgccgaatcccgctgtgccgaacagggcgatttccttcccgcccagaccagacaggaaggctgccattttctcatcgcagctgcccttgtcggtccagaatcccgccagaatccggtcggcatcctgccagccctccgcttctgccaggggcatggcgggcaggttcagctgagcggacagttcctgggcaagccgggcggtattgccggtggcactgctgtaaacgatcacagttttcatatcaaattcctcctgtctgtattgcggatcagttggggcggtccccgatctccgcgagcattttgtctactttccggcggatggcacgatgggccggatcggtgagtcccggatcggccttgagcagctgatctgccgccttccgggcagccgagagcagctcaacatcgttagccaggtcggcgatggcaaactggggcagaccatgctggcgctgcccgaagaagtcgccggggccccggagtttgaggtcctgttctgccacttcaaagccgctgttggtgcggcacatggtgcgcagccgtatctgagcgtcctggcttttgctgtccgagagcagaatgcaggtggactgcaccttgccgcgtcccacccggccccggagctgatgcagctgactcaggccgaagcgctcggcgttctcgatgagcatgataacggcattgggaacatccacacccacttccaccaccgttgtggcgaccagcaggtcgatttccccgtccttgaacttccgcatgacttcgtccttttcggcggccttcatcttgccgtggagcagccccacccggtagtccgcaaagtcatgcttctgcaggttctcggcgtattccgaggcgggcaccagccccagatccacctcgccgggctccaccagcggacagatgatatatccctggtatccctggtccagatgctgtttgatgtagccataggcccgctgacgcttggcgctgtcgatggcgtaggtcttgaccggcagtcggcccaccggcatggtgtcgatgaccgagatgtccaggtcgccatagatcatcaaagccagcgtccggggaatgggggtggcggacatgaccagcgtatgagggctctgtcccttctggcccagggcgatgcgctgtcccacgccgaaccggtgctgttcatcggtaatgaccagtcccagccgggagaattcgatcccggaggagatgagcgcatgggtgcccaccaccagatccacctcaccggcagccagagctgcccggatgcgttttttctccgaggccttggtggaaccggtgagcagctccacccgcagcccgatgggggcgaggaatttctgcatggtttcccaatgctgggcggcgaggatctcggtgggcgccatcagggcagactgggtgtggttccgggccgcaaacacgcaggcgcaggcggcaaccaccgtcttgcccgagcccacatcgccctggagcaggcggttcatgggagtgctgccggcgagatcaccacagatctcccgcaccgaccggagctgggcttcggtcagagcaaaggggagggagcccaggaaatcctcgatctccaccggctgcatggcgaccggagccggggtgtcccgggcggtgcgcaccgccgagagagccagtgaaagggtaaagagctcctcgaagatgagccggcgccgggcaatgagcatatcatgccggctggcggggaaatggatattttcaatggcatattgcaggtgacagagctgattctgcaccttgatgtcagagggaatggtctcctcgagcgtttccagcagcccggagagggccagccgcacttcggcggccagaaaccgggagttgatgccggcagtctggggatagaccgggatcagctgccgggcttcggtcagggtgaagatcagcggagtgttcatttcccgccgcagcagagagccggacaccttgccatagaagacatattcctcatccacctgcagcttgtccactgtgaatttggagttgaagaaggtgagcagcaattcagtgccgtccgggtccaccgcccgtaccttgaaaaccgaaagccccttgcggatatgctgttccccggatttggagagcaccatagcccggaccgcacacggcattgtggggtcggcactgagggcggaaaccggctccgtcaggtcgatgtaatcccggggatagtggttcagcagatcgccgaccgtgtcgatgcccagcttgtgcagcagggcagcacgcttttcaccgatccccttgagaaactggatttctgtatcaaaactgaccgccaaggcgggtcaccccctttctttttagtactggctctcccaatccgagcgcaggatcgccaggaggcagtagttccccagcccctggttgtcccggtagccctgccggagcacgccttccttctgcatgccgcacttctgcatcacaccgccgctgtgggggttgagcacattgtggattgctgccacccgattggcgcccagcccggtgaaagcaaagcggatcaccgcctccagggcttcggaagtatagccctggtgccaccatttctgtccgatgcagtagcccatctgaatctcatcgatgtcgtcattgatcttcacaatgctgatggagccgatgggttccccgacgctgcggggaacaatggcccactggtactgccggggatcatcgtaaccgtgaatccagtccgcaaggacctgttcactgactgccaggctctcatgcggcggccaggtgaggaaccgggtgacctccgggtcagaagcccagttccggtacatggcagcggcgtcgccagcggcaaagcggcgcaggatcagccggggagtttccagggttatcgttccggtatggcgcatggcggaggcctccttgtacagttctgtatattagtcatttta

SEQ ID NO: 4557 - DNA, 4755 bp, Unknown
  16S sequences of unknown bacteria
acgcacttttgtggagccatcctatttggtgttggtgccatactattgtttctgaaagctttcgccggcggagaaaccgacaaacacactcttttttctcttttggctttcggttgttccatcacggctttgtatagtgccagcgccatctatcatttcagcaatcgggcgccaaagtttatttaccatctgcgaaaattggatcattccatgatctacattttaatcgctggaacttatacacccattctgttgacttatctggaaccaccaaaaggcgccgcttttactgctgttatgtggattattgctgccgcaggcattgtaatgaaattatgctggttccatgcgccccgctggctgaccacttctttatatttgctgatgggctgggccatcctggcagatgtatcaatcttttcccatatgagtatcggcgctttgtggctgctcgtattgggcggtgtttgttataccatcggcggcgtgatttatggcctgaaaaaacccaatctttctgtcaagataggctttcatgaactgtttcacctgtttgtactcggtggaagcttgttccactatctgctggtgcttttttacattgcctgatgtgcattttccgtaattcgctgcccatactaaaaacagggacatttttgatatgttccactttgatttgggaggggccagcatgaataagcagcctgaacacaaaaatgagttgaaagatgcgccgctgcctaccattacagacgatccgctggcagcaggctccccacatcctccgtttggtccaaaacctagcccggaagaaacttgggaaagagattaaaaaaaaggaaagggattttatccctttcctttttttaatctctttctgccgtcttccaacagaaatgttgatacttttccaggtatccatctctgtttgctcgctattggaaaaacgcccgttgaagatcacaaaaatttattgcagcaacgaaatttctcctgcaatattctgagaaaaaattatccggacctcgtccaaatcgccggctcttcccaacgcccacatcagcttggtaaccgccgcttcgctagtcatatcatacccttggatcacgcccttttccagtgccagacgaccggtctgataaatggaaaaatcgcttctctcatacaaacattgactgcacaccactactgcaataccatgctccaccagattttgaagctgggaaaccaaatcccgtcggataaaatgcagcccgccggcgccgaaagcttctactacgattcctttataattcatgtgcaaaagcatgtcaaatatttccgggttcagtcccggtgtaagcttgaccaaaaccacatcactgcataagcgctgttctggccgaaacggtccggtcaaaggcggaataacatctttatgaagacacagtccggtagaatcaaccgtagccgcataaggagcattcacgctttcaaacgcatcaaatccggtggttcgcactttcaccgctctggtacccaatattacctttcgattgaaagccacaaatacccccggcgcaccgctggctgccatggcaaaagcacagcgcagattttctaccccatcggtcagcgggtgcaggattggcagttgggaaccggttaataccaccggaatcgggatattgtgcagcataaaagagaggaccgacgccgtatatgccatggtatcggttccgtgggtaacaacaatgccgtcgtagccttcgtgcatctggctgatctgctcggcaataaactgccactcttccggctggatgtttgaactgtccagattcagaatatctttaaagtctacctcataattagaagtaatcccttcaatcatatgcgccagccccccgcttttcaaagatggctccaaaccatctttgcctggcgcggaggcaatggttccgccggtcgttaacagcaaaatttttttcaatgtgatcgtcctttccccttttctgtttttaatatagttgattgcaggggattttgcaagaaatctttcagaaaatattgttttcccctttcttattttgcgacaatctcaaatttttcaaatatagactttgggcagattgtggtttttcttctcctgtggtaaactagaataaatctttttgtccattgccattttatgcttccacttttggatttcactatatttcgatcaatactggaagcaaatggccggtttggttatgcttttccatagcaaaaaaattttttgatattctttgcaaaacctcccatactaagaaaaaagcaaaggaggattgcattatgaaagcttctattaaccgcagcggctgtatcggctgcactctttgtgccgctatctgcccggatgtattttttatggccgacgatgggaaggcggatgtcagccaaacgcctatacctgcggcattgcaggaaagcgcccaaaatgcccgctctcaatgtcccgtatcggttatcgacattgaggaataacgccattggaaaggacttttacgatgagacagcttttgctcaaccattttgagaaatatccgttgatgcagctgcaagactgcgttaaactgctctatcaatgtcattttggttgcggccatttcctgacagattcagcacaggcactactgcgcctgcaaaacgaatacgaaacctgtcgtccaatcgcaggaccgctattggaaccggttggacccaattattgcagattatatctgtccgcgctggacacttccaagctttctttagaaacgcttggaagtctttttacttactcctctcagcagcctgtttcgagcaaagcagtttttgaagcagaccttgcattgttgggcgaaatgattcggcagagagaacttccttttcagcaacccgattgggaggcttttttgtcccattaccgggcaaaaagctatcctgccgtcagccacagtgacacttaccgaaacgcataccaccccgcttatcgtgtcctgcacaaaagctgttgggattactggcccatttttgccgctatcgatcaaatcatgcggcaaaagggctgcggggttgtctccatagacggcggcagcggcactggaaaaagccatctcgcgaaacaactggcagccgtttttcctgcggcaatcgttcatatggacgacttttttcttcagtctttccagcgcacaccaaagcgtttggccgagccgggcggcaatttggattacgaacgctttgccgctcaggtcgttccttctctcaaaacaaaggccgcattttcttacgaaattttcgactgttcctgtggtaaattgtccggtagccgaacggtaaaaaatttaccgctacgtattgtagagggcgtttatagccagcatcctcagtggcgtgatctttatgacctgaatatttttctcactgccaatccgtcaatccgcctgaaacggattgaaacacgaagtgattcatttcttctcaaaaaatttcaagaagagtggattccaaaagaaaatctctatttcgataccttttccgttccttttcatgcagacttaacaatagatacaggctcttttttctaatccatatgttaagttcggtgaaatcgatgaaaagggcgaagatgagatcaaaggagctgcagcagctaccgaaaactacggcaacttctatggtcaaaactgctttatgggtgcttccggcacattgctgatcgtatctacattaatcgcgcagggctatgaagtagacgcactgcaaattgcaatgacgtcctggccgatcgcgattgtcagtatggtagtaggcattgtaatgaatttctttgtggaccgccgcatggttgccagatatgcaaagaaatctccagccgcaaaatagaagcggaaatttatgaggaggcatatttatatgggtattaatttagttccaactgaaatcagcaatttctataatcctattttagctgagattttcttttctatcatcgggttggtttttattgctactggtgtgaaagctttccgggatacggccactgccaaacatgttactaccggcattttctggaccattatgggtgtttgttttattatcggcaaatatattccttcatggattgtcggtgttttgattgttgccagtgcggtcattaccgcgattggcggtgtggttcagaccaagaatgacattcctaccaaagaagaaacaagggcgaatgcagaccgcatcggctacaaaatttttatttcggcgttgatgttggcgctggtgtctgttatcgcagctatgctgggactggtatccggcaataatgcaatcggtgcttcagctatttttggcgcgattgcagtatttgccattacgaaagcgcctgctaagagcattgttactgaaggcagccgtctgctggacaacatgggtccgttgcctttttgccgcagctgctagctgcgttgggtgttctgtttacagcttgcggtgtcggcgatgttatttccaaaggtgtggcaagcattatcccagatggcaatcgttttattgccgttgccgtatactgtgttggaatggcactgtttaccattatcatgggcaatggttttgccgctttctcggtcattacggtcggcattggtatcccgttcctgattatgcagaaggcaaatcctgtcgtggtcggcgcaatgggtttaaccgccggctattgcggctgtctcttatacacatctgacgctgccgacgaataga

SEQ ID NO: 4558 - DNA, 32759 bp, Unknown
  16S sequences of unknown bacteria
atagcggtcgtcgtcgtaacgatcgtcccaatcgtcgtcatagcggtcgtcatcgtaacgatcgtcccaatcgtcgtagtagtcgtcggcccaatcttcccagtcatcgtcatcccagtcatcatcgtcccaatcgtcgttgagcacgatgcctttcacgaattcgatgggcaggcggtattttgtggcgatggattcgatctgttcctgagtgatggtgcggcgcgcggcgtcctgttggctgccggcgttcacaccgtttatgatggcgtcgtcatcggcgaggaagagttccagcagcgcctggatgttgcggtattcctcctcagaggagggattcatcgcgatttccgctttcagcgcattcgccagggagaggtagtagttgtgctccacggcccgcagcggtaggtcataagcggtggcaaaagcgtcgatatccgccgagggaatggccgatagcatcggcagggattgagcgagcatcagcacgttaaactgatcgtcaaaattctcgttgaggaacatgccgtccatggcgtgctgcaaaagcagcgtggattgcttttccgccaggctggcttcaatgggggttgccttggcgcgcgcccacagttcggagacaggcgtaccgtccgccagggcaaggggttgcacgagcaacaggaggagcgatagaatgatggcgacgaggcgtttcatgcgggatcttcctttccttatttcggtttgccttgttttggctttctgtggccgatgggtgtattatagcggcccgcaaggggaaaaggaagcatttgagggatttcctcacatatttctcacaaagctcacgataaagcggctgcccttgccgggctcgctctccacgcgcacgttgccgccatatttgcgcgcaagctgcgaaacgatggaaagccccagacccgtgccgccctcatcgcggctgcggcccttgtccacgcgatagaattgttcaaagatgaggggcaagtgaacggcttctatgccgatgccgttgtcttccacgatgaggcggttattgcccatttcaatgcggatataaccgccttcgcggccatagcgaatggcgttgctgacgagattatagaggatttcccagatatcccgctctacgcagcgcaccgtgagttccccttcgatggaaagggaaatgtttttgttgcggcactggccggagagcgcgtccgccacctcctgcgccacggcgcgcacattcacatcggcgagcggctcgttctggccgagctccgcctggcccagcagcaggatgtcgtcgatcaccgcgcgcatgcggcgggtttcctttaaaatacaatccagataaaacgcctgttcctccggggaatccgccatgccttcgctgagcatttccgcaaagccctggatggaagtgagggggctttttagctcgtgcgaagcgttggcggcaaaatcccggcgcatgtcctgcgccttgcgcacgctcgcgaggtcgctgtgaagcctgccaatcaggtagcagatgctttgcatggtggggcgcaattcgggatagaaaatttcgccgttcttcacttcctgcagatgggtttcaccggaaagcaggccctggatttgctctagttgcgcgatcatctggcgcgaaaaggaagccaatccccgccgcagcaggatcagcagcgcgcacaaaagcacggccatgcccagagcatagccccacaaaaggcgcgtaacgtccgtcagcggaaaacttaggtggatgagcaggcgatcggaaagcaggcgcgcggcgtaaatcgtgggcacgccgccggacaggcggatggaggaactttcaaggccctggagcgctccctggatttcggggaaggccagcatgttttccatagccacctgcgtggcttcggcgctgtctaccagcacgatgccctgcggcaacaggaaaatcacgcgcaggggcggcgcgctctgcgcgatttgccgcgcgagattgggaaggttttccgtagaaccttctgtccatgccgaggctgtgctgaggatggaaagcagggttttctcggtgtcgctgatggcaaaatacaccatcgtgcccacggtgaacagccccagcgccagcgtgacggccacgcccagccaatacaggcgcagcagcttacgcctcatgggcttcgggggcgagccaccggtatccggtgccgcgcagggtttcgatgtagcgggggttggccgggtcgtcgcccagcttggcccgcagggatttgatgtgatagtccaccgtgcgggaagggtcgtcttccgtgggatagccccacacgtcccgcaaaagctggccgcgcgaaacggcctggcccggccggcgcgccagataatacagcagttcaaattcgcggtaggtcagcgctacgcgcgcgccgttttgccaggcttcgcgcgcgtccggctggagggtgagatcgccggagatccacttttgcgcttctggcgttacgcggcgcagagccgtttgcagccgcgcctgcaattcgcgcacgccaaagggcttggtgatgtaatcctccgcgcccagttccagcccgcgcactttgtcgttttccgcgctgcgggcggaaaggatgatcaccggcacgcgggcggtttccttgcgtgccttccactcggcgaggatggcaaacccgtccttgccgcgcagcatgagatcgagcagcagcaaatccggcgtttcttttttcagccgcttttccagctcgctggcgtcatacaggcgcacagcctcgtgccccgcttttttcaccgccgcgagaatcagcaggccgatgcgctcttcatcttccacaatccaaatggtggccatagtttccctccactgggcaagacgcagttcaccttttaagagttacttatattgtaacaccggcaaaaggaagttgaaatcgacggaatgttaattgtataaagcgcgaaacgggagaaaatgggattgtgctcactgcggagcgcagtcaattcccatatatgcccgtattgtttggcatccccaacaaatttttgattttatattggcaggattttaaaatttgggtttcggttgaaaagaaacttgacgaattgccacaaatatggtatcttatcaaaagattaggaggctgaaagtatggatccaaaggaaatggacggcgttcggcagcgtttggcgcgccggatgatgctggtttcgcggcgccggtttttgctcgccgatatgctactggaaaagacgggcattggcgcggggcaggtgcccattttgatggaactgcagcgccatggcgagatgacgcagagcgcgctggccgagcatgtgcacgttacgcccgccaccatgagcggtacgctcaagcgcatggagcgcgacgggcgcatcacgcgccggggagacgagctcgacgcgcgggtttctcttgtgcggttgacagaggcgggggagcggttgtgtgagcgggcgcacgagcttttcatcaaatccgacgaattgatgttcgagggcgtatcgaacgaggaatgcgagtggatttacgccacgctggaaacggtgctcgaaaatctggaaaaggcaatacaaggagaatcgcatgaaaaagcttctaccctaccttaggccctatttggcttttacgattatcgcgcccctgttcatgttgctggaagtgtggatggacatcctttcgcccatgtatatgtcctcgatcatcaacgatggcgtggccgtgggcgatacgcagcacatcatttacaccagtgtgaaaatggtggcggtggcgatcatcggcgtaattggcggcgtgggcaacatgtatttttccaccaaggctggctatggcttcgcgaaggaattgcgcgcggcggtgtatcgcaaaatccagtccttttcctttgccaacatcgatcagttcaaaacgggttcgctcgtcacccgcacgacgaacgacatcgcccagatccagaacgcgtttaccacctgcatccgcatgctggtgcgcgcgccgtttttgtgcatcggcggggtggccgccattttggccatcagtccgcggctgtcgctggtcgtgctggtgggcatggtagcgatggggctgctcgtgtttgtcatgatgaaatacgcgatgcccatgttcaagtgcatgcaggataaactggacaatgtgaacgtcgtgatgcaggaaaacctggcgggcatccgcgtgatcaaggcgtttggccgctcggaatacgagaaaaagcgctttaacgcagcgaacgacgaattggcgaacaccagcatgcgcgccatgcggctgatgtcgctgagtttcccattggtttccctgatgatgaatgttatcatggttatgatgtactggttcggcggcatgttcgtgttcgatggcgcgatgcgcgcgggcgatatcatggcattttccaactatatcacgcagattttgatggcgctcacgcagtcgtcaatcatgctggtgttcgtgtcgcgcgcgcaggtatcgttcgcgcgcgtgaacgaggtgctcaatacctcggtggatatcgccgacgggccggacgcttccgccaccgtggaaaagggcagcgtggagttccgcaacgtttccttccgctatccgggcgatagcgcggatattctcacggacattagctttagcgccgctccgggcgaaaccgtcgccattctcggctccaccggcgcaggcaaatccacgctggtgaacctgattccccggctgtacgacgtgagcggcggacaggtgctcgtggacgggcgcgacgtgcgggattacacgctggatcacctgcgggcgggcgtcggtatggcgctgcaggaatccgtgctcttcactggcagcatcgaggaaaacctgcactggggcgatgaaaacgcgccggaagaatttgtgcgccaggccgcgcaggtcgcgcaggccgcgccgtttgtggaggacatggaagaaggctacaacaccatgcttggccagcgcggcgtaaacctttccggcgggcagaaacagcggctttgcatcgcccgcgcgctcatcaaacggcccaagattttgattttggacgattccaccagcgcggtcgacctggccaccgaggccaaaattcaggcgggcttgcgcgaattgatgggacacctcaccgtgtttatcatcgcgcagcgcatctcttccgtgcgcgacgcggacaagatccttgtgctcgacggcggccgcatcgtcgatatcggcaagcacgacgagctcatccagcgctgcgagatctatcgcgaaattgcgcaatcgcagctgggaaaggaggccgtgtaacatggcgcagcgcagatttcaacccgcgcggtcgggtggccccggcgggccgggcggcccaggacggttcgcggccaagcccaagttgaacgacgcgaagggcacggtactccggctgatgaaatatctgggcaaggtcaagtgggaaatgacaggcgcgatgctgcttttggtggcgtccaccgtgctcaacctgatcgcgccccgcatctccggccaggtcatcgatattctgaatgaaaactatggcgtcaaccgggcggtcagcatggttggtatgatcgccacctttgtgggcaccgccttcctcacggataagcttgcgcagagccattcctctagcgagagcatggtgagcctttcgctcaagggcatggcggtcggcctgctcgcactggttggcggaggcggcatggcagccgccgcggcgaattccaccaccgccctgcgcgatacggtgctgctcatgtttttgctgttcctgggcagcggactgtgctcgctggggcaatcgctgctgctggtgaacgtggcgcagcacgcggtgcgcatcatccgtgcggatctgtttcagcgcttgcaaaagctgccactgcgctttttcgattccaaaacgcatggcgagctgatgagccgcctgtccaacgacgtggataacgtttccaacatgctctccaacgcgctcacgcaggtgctttccagcatcatcaccgtggtggtctcgctctccatgatgctttccctgagctggcaactcacgatcatcgcttgcttgaccattcccctgagcatgctcgtgctgggccgcatcgccaagtacacgggccgcctcttcaagcagcagcaggccgcgctcggcgaactgaatggcgtggtggaagagacgatcacgggcgcgaaggttgtgaaggtctttagccgcgaaaagtacgtgatggaagatttccagcgctcgaacgaggaactgacggaagtcggcaccaaggcgacgattttttccagttgcatcggccccttgatgaacgtcatcgggcacatcagcttcgcgctgatggcgggcattggcggctatctggtggtggcgggttcggtcggctcggtgggcatgatccagtcgtttttgcaatactcccgccagttccagatgcccatcaacaacctggccaaccaggtcaccatgttgcaatccgcgctcgcgggcgcggagcgcgtattcgaggtgatggacaccgagccggagccggaagacgcgccggacgctttgccgctcaagtcccccaagggacatgtggaatttgaggacgtgacgtttggctacgcgccggatgtgaagattctcaaggacgtctctttcgaagcgctgcccggccagaccatcgccctggtgggccccacaggcgcgggcaaaaccaccatcgtcaacctgctgatgcggttttacgacattgatagcggcgtgatccgcatcgatggcgaggacatccggcattataagcgccaggatctgcgcgatagcctaggtatggtgctgcaggatgtgtacatgttcgcgggcacggtgcgcgacaacatcgcttacggcaaactggacgcgacggacgaggaaatcgtgcgcgcggccaaggccgccaattgccacgatttcatcatgcgcctgcccaatgggtacaatacggatctggccgaggatgcggccaatctgagccagggacagcggcaactgctctccatcgcccgcgccatcctggccaatcccgccgtattgatcctcgatgaggccaccagttctgtggatacgcgcacggaaatgaacatccagcaggccatgatcgccctcatgaagggcagaaccagtttcgtcatcgcgcaccggctttccaccattcgcggcgcggatcagattttggtgatccaggacgggcgcatcgtggagcggggcacgcacgagcaactgctggaaaagcagggcgtgtacgcgggccttttgaacagccagtaccgcggcctagaaatttagcggccaacgcgaatttttaagcaaaaagacttgcaaaatatacgcgcgaagcgtatacttgtccaataaaccgcgtgaaggagtgatctgttatgcaggaaatccgctttatcccctgcaaggcattcaaagaaaagcccgcggatgaaaccaagctgggctttggcaaaaagttcaccgattaccgctttgtgatggattattacgatggcgcgtggcaggatgcccgcatcgagccgaacgagcccttccagttggatgcggccaccagcgtgctgcactatggccaggcgattttcgagggcctcaagtgctaccgccgcgaggacggcggcctgcagatcttccgcgccaaggacaatttcgcccgcatgaaccgctcggccgaccgccttgccattccgctgttcgacgaggaactggcgctcaagggcctgattgaactgctcaagattgaaaaggactgggtgccgcacgcggagggcacttcgctttacatccgccccacgatcatctccatggatccgttcctgggcgtgagcgcgggcaagtactataagttctatatcatcctttccccgtccggcgcgtactacgcttccggcctggctccggtgggcatctacgtggaagacaagtacgtgcgcgcggtgcgcggcggcctgggcttcgccaagaccgcggccaactacgccgcttccatcaaggcgggcgaaatcgccaagaagcgcggctatgcgcaggtgctgtggctggatggcgtggagcagaagtacgtggaagaagtcggctccatgaacatgttcttcatcatcgatggcgtgatcgtcaccccggcgctcaatggctccatcctggcgggcatcacgcgcgattccatcctcaagttggcagcggatatgggctataaggtggaagaacgccgcctgtccattgacgaggtctttgaagcggcccgcaacggcaagctggacgaggcgttcggttccggcacggcggcggtcgtttccccggtgaatgagctttgccgcgaggacgaggtcgtccgcatcggcgatggcaacatcggccccatcacccagaagctttatgacacgctcaccggcatccagttcggcaagggcgaggacaagtttggctgggtaacgcgcatctaacatgcggtcagagtggccgaaaaacggttttgggtagtttcggcgggcgggagaagggattcgaacgcccgctttttctttgagtctttgcggcaatgatgcgctccggtgcgttctaaatgtgaggacattatatggaatgcaaaaaactattgatttcaaataatgcagcgatttcggcaatttattttgctttgctgcaatgtggatatgacttttactctatcgaacgtgacgcatctacggtaaacaagctggagagctttatcatatctgacagtagtgaatatggcttcttttcggaagtgagacaaaatacttgtgaggtttatccgtattggccaagagcagccatgatggaaaccgccacattttatatagatttacacatggcgtgtttcgtggattttgatgcgtataaaagtaatgttctatctgctaaaaatatatctgatatagaaaggaatgagaaattttggaactggattttgcgatttccagcagctctaagagatgtatttcaaagtaattgtttcgggcgctacttgaaatgggaaaacgcttggatagaagatcagaacaaaaagcataaagccaatttaagaaaagttgaggatatttttgtgctttgcgaggaaagatttggttccaatttccaaagcatacaagttattcttaatccaataaagtgtgtatattctgcggattatcactcgaaagataagacttttatattctgttcgggtgcgctcagtgaagcatccatcatacatgagtttattcatcactcagtacacccagttgttgcgaatagagaagatgaaattttgtgttgcgactttatgaatttcgatcttgatgcctcatattccctgaatggcagcaaaacgggaaagctgaatgcttttgaagagtatatggtgcgcaagcttacggataaaattttatgcggagatgttcctaaaaatttagatgcgtttttcgaccatgaaataatgaatttgcgtacacgtagatagttcaacgggctgacaacttgttctcaaaaccattgttgtcgtcacccacgatccgtgggtcgaccagtgcgcgcaacgccatatattgtcgcagaaatccgcgtagcaactccatttcaaaggcggctcgaggaagagccgcctttttgcgcctgcgaaaacgaaaaatccgccagcattacaccagattttccggattgagccctttgagcgcttcggggacgaaaatgccgtccttgcggatcaattcgccgtcgagatagatttcgccgccgcccatttctttggtttggatcagcaccagatcccagtggatggcggatttgttgccattgtcgcactcgtcatagcacgagccgggtgtgaagtggaaggaaccggcgatcttttcatcgaagagcgtatcctgcatggcgcggtggatatagggattcacgcccagcgcccattcgcccacgtagcgcgcgccctcgtcggtatcgaggatggcgttgagccgctgcgtatcgctgctggtagccttcacgattttgccattttggaacgtgaaggagatgttttcgaaggacacaccctgataggtggatttggtgttgtaggtgatcgtgccgttcacggaatcgcgcacgggcgcggtgtagacttcgccgtccggaatgttcaaatggccgtcacagggaatggcgggcatgcccgcgatggaaaagcgcagatccgtgcccgggcctacgatatgtacgtcgtttgcgcgctctagccgctccaccagcggttgcatggcgcggcccatgcgctcgtagtccaggcagcacacgtcgaagaaaaaatcttcaaacgcttcggtggacatggcggcatgctgcgccatagagggagtgggccagcgcattaccacccagcgggttttgggcacgcgaatttcgccgtgtacgcgcttttgcaccacgctggtataaagttccattttttccggcggcacgtcggaagtttcaaaggtgttgtccgcggcgcgcacgccgatgtaagcgtccatctgcgccatcagcgaagcttcgtgcgccgcggtaacgtccgcctgcgcggcggaaagccccatcagcaaagaacgctgcacactctgatccttcagatgcacaaacggcatgccgcccgcgttgtagacggcctgcaccagggcgcaaataaaatcgttgcggctgtcgaagccctcgatcaaaattttttcgcccggcttcaggccgatggaatgcgaaatcaggttgtctgccagttggcgaacgcgcggatgaatcataggcatatcctcctgcaatggaacgcgggcctgcgcgcccgctctggtatttgctattatacttcaaattggcgcggttgtcaaatgcggcagaatgtgatatgatacgggtatacggaaaaggagcgatggatatgcagtttgcgtcgttcgcggaggaaacggtgctcttcggcgccaccgccgtggaaaacgaattcatcatggagtacatgttgcaggcgcccggcgattttgtgcgcgtatacctttatatgttgttccagtgccaatatccccaggcgggcaacagcctgagcgacgcgacgcgcatgctgggcatcggcgaagaagattttttgcgcgccatgcgctattgggagcggcagggtttatggcggcgcgtggcggacaatcctccccgctttcagtttgtgggctgccggcagacgactatggacgatgtgccgcgcaaaaaccgggaactgcacgccaagctgcaaagcattctgggtgcggaatacgtgatgcagccgcgcgatttttccacgatcgcggactggcaggaggtattccacctgccggcggaagtgatcgccctgttggtagaaaacgaagtgcaacgcacgcgggagaaaaagcgctcgctttcaggcgtttttaagcgcatggacaaaaccgcgcacgattgggcggagagcggcgttgtaacgctggaaaaggcgcaggaacgcatcgcgcgcgatagcgcgggatacgccatggccaagcgcgtggcgcggcagtttaacttgcgccgggaccccactgtggacgagacgaccctggcggagcgctgggtgaacgaaatgaagctcacggaagcggatgtgctcgcggcttgcgcggaaacggtgcgcgcccgcaatccttccttcgcgtatctggattccattttgcgccggcacgcgggcggcgcgggcgtgcaggcggacattcagaatgagcgcaagcgcgtggaaacgctgaaagaggtgtatgcggagctgggcgcgcccggcgcgcccgcgcccgcgcagctcaaaacgttcacggattttttgaacatgggtttccaggcggatacgctggtggaggcggcgcgccgctgcgcccgcgcgggcatgcgggattttgccgcctgggaaaagtatgtgaaccagtgtgcgcaaaaaggactgttcacgctggaagccttgcgggagaacacgcgccgcatcgacgagctttccgcggcggcggaaaaggccatgcgcgcctatggcgacgaccggcgcgcgggcaacgccgaccgcgcctggattgagaaatggctggccgccatgcccatggacgtgattttgctggcggccgagcgcgcgcagggcacgcagctcccgcgcaagtatatgggcaagctgctcgccaattggcagaaaaaaggcatcaaaaccgtggaagaggctcagaaggaagaaccggttgtgcgaatggataccgcaaagccgcaggcggggaaggtcattcaggattatgcgcagcgcgaataccatgaggaagattttgccgtggacgccgtgatgcaaatgtggatggaggacaaacagaatgacgcgcagtgaaatggtcgaacaactcaaaaatgagtatcgccgccgccgcatgcaggcggaacaggagcaggacgcgcgcgtgcgcgaagtggagcgcgcggatccacagattcacgcattgtgggcaaaacaggcacgcttgcttaacgacgctgtgcgcgccatggtcgcgcgcacgcccgacgcgcaggaaaaggccgctcgcatgcgcgaagaaggccaggcggttctgcgggagattcgggagcgcacggtgcgcgccggttttccggaagattacatgcgaatgcgctaccgttgccccaaatgcaaggacaagggcatggtggaaagtggtttttgcgagtgctttcgccgggaactaaacgagcgcatgggcagcgcttaccgcacgctggatagctttgagaccttccgtgaagatttcatccccgcgcagcccgtcgaaggcatagcgggcacgcagcggcaggcgctgtgcggcgcgcgcgattacctcttgcgctattgcggaaaatatcccgccgtggataagcgggtgttggtgctctatggcgaggctggattggggaaaacgtttttgctcaattgcgtggtgcgccgcctggccgagcagggcgtggacgtgatgaacgtgaccgcctataagatgctggacgccatgcgggacaaatacttgggcgaggatggcgcggaattcgaccgcatgctttcttgcgcgttcctggcggtggacgatttgggcacggaacccataatgcgcaacatcacgggggaatccctttttatgctgctcaacgagcgcgtgaacgcgcggctgtgcacgattttcgccaccaatcttacgccgccccaactgcgggaacggtatggcgaacggatcgcctcgcgcctgttcgatcgggaaaacggcgcgtttttgcgctttgtgggaaaggatttgcgcaccccaaatggctgaggtacaacaagaagtgttcgcgcggcttgcgcggatggacgtcccttttgaggcgctggaacacgcgcccgcctacacgatggaggagtgcgccgcgcccgcccgcgcgcttggcgcgctggtgccgaaaaatctgtttttgtccccgcgcagccatagcgcgtatgttttgctgctcacccggcccgaggcgccttttcgcacatccggcgtttcgcgccagctggggctttcccgcctggggtttggtccggaagaaaaactgtgggaatatttgcgcacgcggcccggcgcggttagccccttgggcttgttgttcgatgaaacgcacgccgtccgcctcgcggtggacgcgcggcttcaagaagaggaacggctggcgttccatccctgtgaaaacacctggtcggttgccatggctggcgcggattttttcggccggtttttgcctgcgctcggctatgcgccggaatgggtttcgctggaagaagagaggtgatgggggagcatgcgcaaattttttcgctgggtgctctttgcgctcgtgtgcctcgccgccctgggaatttggcgcgagcggcatggcgcgatttatttgccatttcgccagatcacgcccatcgtttcggcaacggaagcaggcgagggaaacgtgctgttggtgaacgcctggcatccgctgccggaggactatcagcccgctgcgctggtcaacctctatgagcaaaggcattcgtttctgctggcgtcgagcgaaatctggctggaaaagaccgcctatgaggcggcggaagccatgtttcatcaggcggaagaggatggggtgaacggctttatcatcaccagcggctatcgcacgcgcgcggagcaggaggaaatctatgcccagaccaccgatggaaccgccgctctgcccggcaccagcgagcacgagacgggcctcgccttcgatgtaaccgcgcagcgcgacaacggcggctttgaggaaacgccgcaatttgcttggttgatcgagaattgctgggatttcggcttcatcctgcgctatcccgaggaggatgaggaaattacgggcattgcttacgagccgtggcattaccgctatgtgggcgtggaagccgcgcgggaaatccgcgataggggctgcacgctggaagaatatgtcgaaggatgaaacgcaaaaaattcgctacccagcgcttgccaatttttcgtttggcaagcgctgggtagctacatgggtaacataggcggattttgcggccattttcctcaggttttcgcgccgccgaacttttgaaccgcgtccacaatgagcgcggcggcgccctccgtgccaaaacgctgggtgtccaaacagaggtcgtaagatcccgcctcgccccatttgccttcggaaagactatcgcaatattccgcgcgttcgcgatccgccttgcgcacttttgccagcgctttgtccggctcaataccatcgcgctgcgccacgcgcgcggcgcggctatccgcgggcgctgtcacgaatacgcgcaagaggtttttgcgcccggccaacacgtgatccgcgcgccggccgacgatcacgcaaccgccttcgctggcaatttgttcaatcacctcgcgttgggcgcgggcggcgatgctgtgcagcggctcgctttggtcgagcgtgtagatcgtttcgaacgagggggccgctttttcgtcgatgctggccaggtattgcacggaaaggccgctcttttgcgccacggaggccagcaggtttttgtcatagaagggaatgcccagttgggcagccacctggcggcccacggtgcgcccgcccgcgccatagctgcggctgatggcaatcacggtggaaacgccgggattgtaggtttgctggagcgcttctcccgcaaaatccacttgctgggaaagcgcattgatttccctgcgcatgcggcggtcatacagcaggcatagcgcgatgccgaaaacggtcgagagaggcacggccaggcccacgcccgtgagagacgcgccgggctggatgctcatcacataggaaaccggcagccggatcaaaaacgattgcgcgatgctctgcaccatcacaaacgtggagcgggaatgcccgttgaaatagcccaggaagctgaatagaatacaggtgagcaccgcttcaggcgcgaacccgcgcaggtattcaaaagcccgcgcgatatcctgcgcgttgctggaaaatagggaggccagccaatcgcctttgaacagcgccagcaaagcgatgaccacgccgatgcccgcgcccacgcccatgccgtagagcatgcctttgcgtgcgcggtcctcccggtttgcgcccacgttttgcgcgacgaaggaggccatgcattgcataatcgaggaaggcacgagcataacgaatgactgaattttctgcgcgatgccatagccgttggaagcgtccaatcccaggcggttgataaacgcgcagatggccaggaaggaaacgttggtcagcaattcctgcaaggccagtggcgcgcctacgcgcacaaaatccttcacatcgccgcccaggcggatatcccggcgagaaaaggcaaacggcaacttttgccgccggatgatcgccagcgaaaggatcacgctcaccgcctgcgccgcgatcgtggcgattgccgcgccggccacgttcatatcgaataccgcgaccagcaacagatcccccacgatgttgaccacgcacgcgatgcccacaaacagcagaggcagccgcgaattgcccagtccgcggaagatgcagctgatcagattgtagaacactacgaacacgcagccaacgccgcaaatgcggatgtattgcgctgtgagatctaccgcttcggcgggcgcctgcatgaggatggctatcggctccgcgaaggcgaccagcgccacagtgagcacaacggaaacgatgaggaaaaaggcaatcgcgccgccgatgagcttgccgatgcgctcgtttttgcgttcgcccaaatagcggccaatgaggatcatcacgcccgccgccagttggctgagtacgaacgtgaccaggttcatgatgctgctgcccgtggaaacgccggaaatgcccgcgttggtgccaaagtgccccactaccagcatatccaccgcgccatacatggcctgtaaaatctgcgcgcccagaatgggaaccataaattgcatcatcttgccaaatatgctgccgctggtaaagtcctgcttaccgtccattttttctcaccccgtatctttaaaagacgcgcataaacgcgccaaacgatattgtagcgcgcaaaaattggcccgtcaacagtgcggcggggatttgcccggaattttacgatgccgccgcagatgcaggcgctatatatcgcgcggcatttcgcaaaatcgcgagggcgagacgcccgtggttttgcgaaaaacccggctgaaatacgccagatcttcgtatccgcagagaacggccacctgggaaacggtcatctggcttcccagcaacaggtctttcgccatggccatgcgcaggcggcgcttgtattccgaaggagtttctcccagcgcctggcgaaacaggcggcgcaaataggagggagacattccacacagccgggagagcgcatcgggagaaacctcctctgtaaaatgctcatccagatactggcgtgccggggcaattttgttcagatacggagaagcgttggtgcaaacctcgttttccaacagatatagcagttcatacaaaaatcctatgcaccgctcttcgtagaaatggtggcgcaccgcccatatatgaatcatccttccaaaaacctgttcgaatttgattccgtttgacaagtgttttttggtgattttattgcccagaaaattctgctcagccaaattaaagttgaccgtcatatggacaaaaggcatattgggggagcatcgaatcgtataccgcgtttcccggggcaaatagatgcaatcccctgcggaaagcacgatgttccttccatcgatgaaacagtatttggcctccccttccagcagatacacaatgccatcgtaatggcgctctttggcatgttcatcgctaaaccaggaaggcgacgcattgaagcggtgtgtccaaacgataccggtaacaataggcatagccattcctccccgagccttgaataaaagcattataggcacttttttcggtactgtcaagattttttctgcgcattttttccactattcttccatcagcactatgcgttcatcctgttttattcctcttcggtgcgtggcgcccggcataatcgtatgccgccccgaattttcttgtattgttttgtccaaatggttcatttcctgcatggacaatgccaaggccataaattataattttttcatcaaatagatgcgcaaattctttctctaaaactgataaggaggccgaaagatgctgcattgtaaatcgcccgcgaaaggcggtagctttattggcaatctgcggtatgacctgcgcaaaaatcccgcgctgcttttaatgatgctgcccagcgtagccttctttttgctgttcaattatcttcccatggtcggggtctactatgccttcacagattacaacgtgcgggagggtctgttcggcagccgctttgtgggctttgccaactttcgctttctcttttcctcggggaacgcctggacgtttacggccaacacgctgatctacaacatcatttttatcgttgtgggcaccattctgcgcattgctttcgccatcatgctggcggaaatgagtgccagactcttcaaaaagatctgccagacgctgatgtttttgccgcattttgtgtccatggtgctggtgggcaccatttgctttgccctgttcagcgcaaacggctttatcaataccgcgcgggccgcacttggcatagacaaattctatttttatgaaaccccctgggtttggtacattctgattccgctggtcaatttctggaaaaccactggctatggaacagtggtctatctctctgccattaccggcatcagcgatgatctgtatgaagccgcagatctggatggcgcatccttctggcaggaaatcgttcacatcacactcccctgcctgcgtcccaccatcgtgattctgttcttgatgaacctgggcgggatcatgcgcggccaattcgatctgttttatcagctggtgggcaatgttcccctcgtgcgaaacaccacggaaatcatcgatacctatgtattccgcacggcgacagaatcctttgatatcagtcggggcactgcggtagggttatatcaatccgtggtgggcatgctcctggtgctggcttccaactggctggtacgcaaaatcgagccagacatggctctattctaaaggaggcgcgcaccatggaaatgcgtaggcaaaacaatcgtggatatcggattttcaaccgtctctcctgtgttctggtgggattgttctctttggcgtgtctgcttccctttttgctgctgctgattggctcctttacggataacgatctggtggtacgcaatggatatacctttttcccgcaaaaatggagtgtagacagctatatctatctcttccgcaaccctacagggctgctgaacgcctatcaggtgacgatcgttaccacgctggcaacgaccgcgggcggcttgtttctcacggccatgacgggatacgccctttcccggcaggatttccgcagccgcaacgtcttttccttcctgttttatttcacccagctctttggcggcgggctgatcccctggtacatggtaatcacgcaatacctaggcatgctggattccctctgggcgctgatcgtaccctcgctgctcagcagctataacatcttgctgatgcgcaactttatcaagcaatgcgtgccaggggaagtcgtcgaatccgcccgcatcgatggtgcgggagatctgcgcatctttttgcggattgtgctgcagctttccacgcccgcgctggcaaccatcggcctgttcatcgccctgggcaaatggaacgactggtattcttccatgctgtttatcaaaacggaatccaggcacacgctgcaatattacctctatcgcatggtcaacatggccaacgccattcgaaatatggcgcaggcgggcgtcagcgtggatgtgcgcctgccctccgaaaccctgaaaatggccatggccatcgtagcgaccggccccgttgtgctggtatacccgtttgtgcagcggtatttcgttaagggcctgtccataggcgcggtcaagggttgaattctgcgtgaatagcaagacacggaatgcgccagatcttgcgcgcgggaaccgggcaaaattcggctcgcatttcggggattgttatattagcggccacaagaggccgccggtaatacaacaagaagggagttttctggtatgaaaaaaatggtatccctggttctggcgctcacgatggcacttgcgcttctaggcgctgtggcggaaacggaggaaccgatccacttggtcaccatttccgccggcagcaggcctgcaggctacgacgccgttatggaggctgccaatgcctactcggcagaaacctacggcatcacgattgaaatccgcttcctggattgggatcccgccactacctatcccatcattgcaaacaccggcgacggcgtggacatggtgtggtattcttcttggcccggctcgccggactacgcccgccagggggctttcgtggagctggaagagtatctggaaatgccggaattcgccgcgctgaaggactgcatcagcgaaaatgcgtggcgggatgtcgccatcaacgggcacatctattgcatccccgcaccggaaaccacctatgccgccaactatggcatcatctaccgttctgacctgtgcgaaaaatacggccttcccgttcctgacacgcaggagaacgtcattgcctatctggagggggtaaaggcgcaggaacccgatatctatccgctttgcaccgctttcacccgcggatacgatctttcctgcctggaaaagcgggtcatgggcgcgagccaatacggcctgatccccgtggattccctggacaacctggtcgattactttgattccgaagaccagttggcggattatgaactgattcgcttctttgtggaaaaaggcattgtcagccgcgatttgcaaaacgatcccattagcggcgatgaaaagctgctcgctggcacggccgtaatggaattcggccatctggacaattttgccggccgcttcagcaccctggagcaggcgaagctgacggatgaatccaaggccagttggacgctggatttcattccattcaacgtgaaccatggctatgttttgcgggatgcggccacgaccgtgaatgcaactgccatcagttatgcgtattcagacaacattctggcatccctgacctatatccaggctgtgctgaccgatcccacgctgcaccacctgatccgctatggcgtggaaggcgtgcattacgagctggatgaagacggccactatgtaaacctttcgcaggatttcacctcctgcggcatgtccacctggaactggcgctccgatgcgttgagcctggaaggcggcaattccgtcagcgatctgaaataccaggagatcctggcgctgtatgaatcggtagagccggtttcgtgcgcttttgtcttcgacagcaccagcgttaaggacgaagtcgccaattacaacagcgttgtggatcagtatctgaaacccctgcaatatggcctggtggaagatgtagaaggcgcgctgaataccttccgggagcgggccagcgccgctggcctggacaaaatccaggaagcctatatcgctcagtacaatgcgtggctggccaaccaataagattttattcctcacgcaatggttctgttcccggcagcccgaggttgccgggaacaactcttgcatgggggcaaaaagtcccgtttccggctggagcggctagcaaaaaggagaatcactatgcggcaaaactggttccaatacgccattgcttatcaaatatatcccaaaagcttttatgacagcaacggagatggcaccggcgacctgcgcggaatcatcgccaggctggattacctgcaatctttgggcgtcgacctgatctggctttgccccgtctgccagtctcccatggtggacaatggctacgacatttcggactattaccacatcgatcccagcatgggcgaagatgcggacatggatgcgctgatcgcccaggcggccaggcgcgggattgccgtgatgatggatatggttgtcaaccactgctcggatcagcacgaatggtttcgcaaggccgttgcccatcccgaaagcgaagaagcacagcttttttacattcgcagggggcgcaatggccagccgcccaacaattggcgctgctggttcggcggcagcgcgtgggaacccattcccggcacggatttctattatttgcatacgttcacccgcagccaaccagatctgaactgggaaaacccggcgctgcgggaaaaaatctaccatatgctcaattactggctggacaagggcgtcgcagggtttcgcatggacgctattacctgcctgaaaaagctgcccctggaaaccatcctcccaccggatggcgaggacggactggccgcggtggcgcgctggactgaaaacattcccggcatcggcgattttctgcgcgaaatgcgggagaaaacctatggccgcgtacacgcggcaaccgtaggtgaagcgagcggcgtgcgaagccgggaaaacctgatggatttcatttcgctgcggcacggctatttttccatgatcttcgatttttgcgtcagccgcatcaatgtaggcttttattggtgtgataccctgaattggacgccggaggattttaaggcgcgcgtgaaggtttctgctgagaacgccggcgaggaaggctggatgggcatcatgctggaaaaccacgatcagccccgctgcatcgatcatttcctgccaccggaaggcagaaatttttatggcgcctccatgctggccctgttccagctcatgcgccggggaacgcctttcctctatcaggggcaggaaatcggcatgcgaaacgtggcttggcggcacatctggcaatacaacgatgtgtccagccacagccagtaccgggtcgcgcgtcagcgtggctacagcgaagaagaggcaatggcattcattcacaccatgagccgcgacaatgcccgcactcctttccagtggagcgcacaggagcatgcggggtttaccgttggaacgccatggcttccggcgcatgaaaactaccgcgaaatcaacgtagagcggcagcaatgcgacccgcattccctgctgaattggtaccgccgccttattgcgctgcgaaagcaagcgccatggcaggaggtactgaccctgggaaacgagcgccatttgccggaactgggccacaatattctggcctatacccgccaactgggcgacacaaaattgctcgtcgtatgcaattttcaggccagggacgcgagcgttcccattgcgccggcacaattcgtcatcttactgagcaactatacggaaccatcgcgctgggagggacgtttacccttgcgcccctttgaagccgtattgctacaggaaacggaggcaaaatcgcatgcaacgctttaaaatggatggtcacgccgacagcctgttgccggagggcaagtggaacctcgtttggcacgacgaattcgatggccaaaccctggataggcaaaaatgggattttcgcacggagattatgggaaaacggcatcctggcatgtgcgaaaatgagggcgtctttctggatggcaattccagcctgattttcacgctgattgaaaaggatggacgcgtttgttgcgcgactctgcaaacgggacacaattttatggacgccgtgcgctgccaggaaaaaacgaagtattccggccgcctttactggcccattcccacctttcgaaagcccttgtttctgcacacctatggatactacgaatgccggtgccgcttgcagcgccgggaaggatggtggagcgctttctggatacaatcgccaaccatcggcgcttcccctgacacttccagaacgggcgtggaaatcgatgtgatggaaagctttcacccgggcgagctgctggaacattgctgccactggggcggctatggcagcgaccaccgcatgcgaagcgcagggtgcaggcggagcggcttcgataccgaaagctatcacctcttcggcgtgctttggacaaaggagggctacaccttctacgtggacggcgtggaagatggccatatggaggggcctgtatccggctgcccgcagtttttgttgattggcgccgaagtgaatggctatcgcgagcacttttgccattccgccgaagccgccgcagcggttggcgataccttcgccgtagaccacattcgggtgttcgatccggttcccgccccgtaaaagggctgcaaaaagctcgcttcgccattgcgtgctgcccgggagcgtggtataatagaaccaatctgtttgtatgcaaacgaccgataaggagggagtccccatgcgcgcggcagaaaccatttcccagcgcatcgcgcccgcagcacagttgctatccccactcggcaaggacattgtggatatgttccgcgcctgctttttgaacacgttggagaccacctattgtgaagaaaccgacggtacgacgtttatcatcaccggagatattcccgcgatgtggctgcgggattccagcctgcaggtgatgcactacgtccgctttgcggacgcgccggaagtcgcccgcgccattgaggggctgatcgagcggcaaatgcgctgcatttgcatcgatccgtatgccaacgccttcaaccgcgaaccgaacggcgcctgctgggccaaggaccgcccggaacaggggccgtgggtgtgggagcgcaaatatgaaatcgattcgctttgctatcccatttggctggcgcatgtctatcacaaaaagaacccagcggccaatttgtatacagacgctttccgtcaggcgctcacagccattgtagatgtattcgccaccgagcagcggcattgggaaagcccgtactattttgagcgggacgactgcccgcccaccgatacgctttcccacgcggggcgcggcgcgccagtcgcgtacacgggcatgacctggtcgggcttccgccccagcgatgacgcctgccgctatggctatctggtgccctcgaacctatttgccgcctcgcaactcaagcacatcgcggcctttgcccaggaatatggcgacgcagcgctcgcggcgcgcgcccaaaccctgcgcaagcagattcaaaccggcctcaccgcctatgcgctggtgcagcaccccaaccatggcatcatctacgcttacgaaaccgatggcctgggccattacacgctgatggacgacgcgaatgtgccgagcctgctcgccttgccgtatctgggcgcgtgcgaaaaggacgatccgctctacctgcgcacgcgcgatttcgtgctcagcatggacaaccgcttttattatgagggacgctacgccaaaggcgtgggcagcccgcacacgcccagcggctatatctggcacatcgcgctgtgcattcaggcgctcaccgccacggaggacgcggagatcctttccatcctgcgcatgctcctcaatacgcacggcgggacgtaccgcatgcacgaaggcttcgatccggaaaatcccgaggcgttcacgcgcgcctggtttgcctgggcaaactccatgtttggcgaattggtgtattcgctctatgaggcgggcaagctggagagcatggtcgcgcaactgcgcgcggaggggaaggacgcataatggaaacgtacatttaccgctgcccggtatgcggctttgtgtatcaggtgccggattattgggtttcgtttgcgccagaggaaacctgcgaatttgcgcatatagattttgccaagggcgagtcctgccccaatgcggtgctcaggcgcattgagcaggaatctgatgtgtaaggaggatgtatccgtgaaaaccatcgaccaattggaccgcaatatggccatcgtcgcccgcgtagatgagccagaggttgagtggagggacgcccgcaaagcgccttttcgcatatgcggattgtatgaaccccaggcggaaggcccgtttcgccgcatgccggagaacgtggcgaaacgggttagcgaaggcgtggcacaactggcgctgaacaccgccggcggccgcgtgcgcttccgcacggattccccttatgtggccatccacgcggagatgaatagcgtctgccgcatggaccacatggcctttacaggcatttttggctttgacctgtacggcagaaaaggcggcgaggaggtgtatctgggcacgttccgcccgcccgtggatctgcaaaccggctacgaatccaaaattgcgctcccggacgggggagaatgggatgtgaccatttactttccgctctacaacaacgtcgaccgcctatggattggtttgaaagagggctgcgctctcgcggcgccctgcgaatacgaattctcccggcccgtcgtgttttacggttcgtccatcacgcagggtgggtgcgcttcccgaccggggaacagttttgccgccatcgccagccggatgctggactgcgatcacgtcaatctgggcttttccgggagcgccaagggggaagccatcatggcggaatacatcgcggggctacccatgtgcgcgtttgtgctggattacgaccacaacgcgcccagcgtggaacacctgcgcgccacgcacgagccgtttttccagacggtgcgcgcggccaatccggatctgcccattttgctggtgagcaagcccgatgtgaactggcgcaaccaggcggacgcgctggaacgccggacggtcattctggatacttaccaacacgcgctggcggcgggcgaccgccacgtcgctttcctggatgggtttatgctcttcgatgggccgatgcgcgatagctgcactgtggatggttgccatcccaacgatttgggcatgatgcgcatgggcgccaaaatggcaggcgccttaagcgctttgctggtttgatttgcacaattggggctgtgaaaaaacggcgaaagttttttcacggcccccgatttatccaggaaaaacgctagcctgcactagtcaacaacctgtcaaggccaagccgctgatgcggtggctgcgttggcggttgtgcgcaggctgagacctctggctctggaaatcctttgcgcgtcgcgcctcgcgcaattacaggaaatattgaaccctgccatagcttacttccccgttcaccagcttgtccccaattttttggcaagccaaaagcgcgcagagccttgcggttccgcgcgctttatccttgtcgttcttcctgtgccattgtgggatttacgcctgttcttcatccggaagataatcggccagctccttgatgaatttcttgatcgcgatgtcgcccatatcgccggtgtccagctgcatggaatcacgagcggaatacatgatggccagcacgcccagggtagacttgggatcgacgcagaaatgatcggcgcgcagcaagatctcttcggaatgttcgcggcagatggcgctcagccgttccgcgtccttcatggaatccacatgaatcttaatcaacatgggatattctcctcctttaacaatgctcgcgagctctttgcccgcatctagtattgtactacaatgcgtattaaatttccagccaatgcgtgtaaatctccctgaatttcaggcagagcgcagccgggctgacgctcgccaacccggctgtgctgggaggtcccggcttatgcgcccttgctctcgagataggcgtctagctgggcctgggcgtcggcgatcatatcctggaggccggcgtcgttcatcttgcccatgaactcctcgaaaatgtcgtcgatcggaatggtgccggtcgcgaaatcggtgtagtattcttccttgatggcggtgatttcagccaggttctgggtccaggcgctgctgtcccaggtgaaaccgctgatggcggaaacgttggccgaggtttcaatcgcctcgtcgtacagctcatactggtttaggacaggggccttggccgtgccgtccacctgcgcctggctcacttcgatggaagtgaagaagtacgcgggctgcgagaagccccagggattgtaattgctagtgccgacttccgtgcgcagcacgccgcccgcgcaggcttcgctctgctcttcggtgacatagttccagtgatagccctgcacgccatagcgcatggtatcgcagaagagcttgtccacgtgcaccagttcaatgtatttcagggcggcttccatgcgggccggatcgtcttccagcgtgatggagagcgcgttcatggagccctgcacgccgtcggtgctgaggttggggccgaagtagcaggtcatttcggtattgtagccattggacacggagaaatcgtagcccggccacgcctgcacgaagctgatgcgctccttggtggtgtcgacggaggtttccgtgagctgcgccgcgtcgggattgaccaggcccagcgcgtaccaatccgccatagtgcggtagcgctccatgaccgcgggatcatcgaacacgctcaccacttccgtggtgccgaagacgcagccgatcatggcggtgcggtcgatgaagtcgaaggagctttccattcccggaggattgccgccgacgagcacgggatactcattttccggcagcgtctctttccaggccacgaggaagtccgtcagttcgctccaggcgccgatcctttcggggatttcgaagcccagctccgccgcgacgtccgcggggtaggtgatgtagttcatgatggcgtagtcctttttcacggggatgccgtacaggccgccatccgcggagtgcgccagcgcccacacgtcttccgtcatgctggcgtacaggtcgggcgccaactcttcaattttgccatcgaggttggcgaacaggccctgcgatacgcactgattgaagttgttgtaccaggagcaggtatagtaaatgtcgtatacctcgccggactggatggaaagctgaatctggtcgttggtgaaatactggatgtcgcattccacgccaatggcttcgcggctcattttgttgagttcttccagcaccatggcgttgtcgatgggggccacgtcgcccgtgcccatggcccaggtcagcttgatgggttcgctttccgcgcccgcaaacgaggccacggacagcaccatcaacagagcgaggatggcggacatgagtttcttcataagtggggaacctccttttttctatttacaacggcaaagccgttataatttgggggagcgctagcccttcaccgcgccgatggtgaggccggagatgaagtacttttggaaaaaggggtaggagcaggcgatggggatcaccgccaccatgaccatggccatgcgcacggtttccgagggaatgttggtggccgtgcccggcgccatgaactggctgttgcggcttaagaaatcgatggagttttccagcgtgatcagcacgtattgcagcgggaacaaatcctgcatgttggagttgaggtagtattttgccatcagccaatcgttccagtaggcgaaggtgtagaaaaggccgatggtcgcgatggctggcagggaaatgggcagcacgatctgcacaaaaatgcggatctgccgcgcgccgtcgattttggcgctttcgatgatggcgtctggcacggtggtctggaagaaagtgcgcatgatgatcacatagaaactggagcagcaaatgggcaagatcagcgcccagtaggtattcttcaggttgaggatctgggcgttgatcatgtagctggcgaccaggccgcccgaaaacagcatgggcagaaagatgaaccaggtgaagaaaccccgcaggcggtagttggggcgagagagcgcgtatcccatggtggagcacaacaccagcccaaagcaggtgcccacgatggtgatgccgatggaattgaggaaggcgcggccgatgtattccggcgtgcgggccagataggcgtagctttccacgctccattccatgggcacaaagctgtatcccttggtgagcacgctcgcttccgaagagaaggacacgatgcaaacgagcaatgccggcaggaagcataggagcgccagggaaatgaaaatcaggctgaaaaccacattggtaacgggatgtacgcgcatatagtgcaggacgacgttgtcgtgccgcttggcttttttctggatggccatggcgcagttctcctttctgtcttaaaacaggccggcttcggggtcgatctttttcaccacgatgttggcaacgacgatggtgaggcagccgcacacggattgcagcagcgccgccgccgaggaaagattgatgttcgggcgctccagcagcgccttgtagacgtatacgtcgatggtctgcgtgatggaggtcagcgagccggaattgcgtgtggcctggtagaacagtccgaaatcgctgcggaagatgttgcctaccgccatgatgaacatgatggagatgatggggcgcagcgtggggatggtgatgtacttcgtttgctgccatttgctcgcgccgtcgatgagagcggcttcgtacatctggctatcgatgccgctgatggtcgccatgtacaccaccatgttgtagcccatggttttccaaacgttcaggaacaccaaaaaccacgtccaaaatcccacatcttggtaccattggtgcttgggattgccgatgttcaaaagctttgccgtgttgtttacgaggcccgcgtcggttgcgaggaaggcgtatacgaagtatccgatgaccacccaggagaggaaatggggcaggaacatcatcgtttggcaggttttcgccagctttttcgaatacagttgggagatcatgatggccagcgctacggggatgaccacgcccaggacgatgaaaatcgtgttgtataccagcgtgttgcgcagcatcgtttcgaaatagctggatttgaacagaaactggaaattctcaaagcccacccaatcgctattgtggatcaggctccacaaaaagctccggccagggcgcgcgcggtagttcttgaaggcgatgaccacgccaaacatgggcgcgtagcagaagacgatgtaccaaatcgtggtggggagatggagcaaaaacagctccaaattgtcaaaggacgatccgcaggacccctcgttccttcgcctgctttttcgcgccttttttggtatggatgccgtagagattctgttcaatgcgcacaccctttctggccaattgccggttggtcaatacacttgataatgtatatgaattatcatgggcgtattataccattagaccatataagttgtcaatgataaataaacattttttatacaagaactgaaattcggttggtgacttatgcataattgcaaatttgagcatatgcgcaaaatgcggcatagatatggcgaatatatgtgaaattcagtcaataaaagtaaagggaatattgagaataaaattgtgatgtgagcatatgggaaaattttgaaatgaaaagatttatgcatgaatggagcaaaatgcaataaatccgccaggcaaaacgcgcctggcggaaagattttgggatgggttgttcgcggttaacacatgcagcagcagcggcagagcatgttggctagacagattgtgaggcatgggttggcgcacagcgcctgcggaatgccgccaaagccgtgtccataggattggtattgttcgccgctgctctccaactgctccaggaacgcgcggtactggccgttggccggatccatgcgcacggcggtttgcgcgtattccagcgccgccgcccggttgcccacgcccaggttggcctgcgcgctcaaaaagaaccattcggcatcgcgccccggcatgcgggtgagcaggttcagcgcctcataatattggccgaagcggatgtagttgcgcacggtttccatatcgggcgcgccgccgccataggagccgctgctggaaccgccatagccgccgtaggggccgcgatagccgccatagccgccgtaggaagaaccgcttccgccataggaggaaccgccgtaggaagcgccgccatacgagctgcccccgccttggcgcagtttcatcacctgcgaataggcctcgttgatttccttcattttggcctcggcttccttggaaccgttgttcagatccggatggtatttgcgcgctagctgcttataggcctttttgatttcttcctcggaggcgttgggagatacgccgagcacgcggtagggatccatcattgcttttcttcctttcgcttttgcaggtaagcgtacttggtccatacgcccgagtaaagtacgtttttgagcaggttggcgtcgttgacaatggggagcttttcgaattcccgcgcgcattccgcgatgtgcagcacgaggatttttttgcacatttcttcaaaatcctcccgtttgcgcaattcgagcaggggattgaagcggccgcgcttttcgtcttccgccagatcgtcgtatgcgtccatcacgtagataaagcgccccagcgccgcgcccatatcgcccagcgtaggcgcccacaggtcgtctttccaggcgtacaccgcgcccagcagccggccggtttcgttggcgggcgcgtcgagtcccgccgctgggtcgcgctcgatttcggcgatggcggcgatgcgggattcgatggcggcgcacgtttccgggtgcaactctttcacgcgcgcgtagggcttggcgagaagcttcatttgggcgcgcgcggaagcgcttttatcgtctttggcatggtcggcgcacacatggtaagcgagcgccacgttcatatccgccgcgtattccgtggcctcgctgaacacataggcgtggggcttagcgggccgcgcgccgcagcgctcctcgcccgcgcgctcctctggctcgtagagcgaagcgagcagcgcgctcaaaaacgccatatcgtagctgagcaccgcacgccccactttgccatagcgctgggcaagcacgtggcacagcccgcaatactgcgcgcggaaacgctggtattcctccgcggacagcgtttccttattgatggtcacatagccaaacat

SEQ ID NO: 4559 - DNA, 11007 bp, Unknown
  16S sequences of unknown bacteria
ctgttattttaagagaaaacgccaaaagtgcgaggcacgattggaagaaagttacggtgaatggcctgactcgatttgtgaaataaatcgtttttattctattatttagtttgaaatactcttaatgttgaattactctgttttttcagataaattcagtgaaaatttttattaaaaaagcacaaaaaactgttgacaaagagggttaagaggtgtagtgtatatgtggttagtgaaagctaactatatattttgatgaaaggttagcgtttgctaatctaaaatttaatgcttgagttagctgcgactaattagtgagagctaactggatgtatggaggtaactatgatgccattgacattaacaaatgttggagaaaccaacatcatcaagaaaatcggcggctcgccggaggttaagaaacaccttgagaacctgggctttgtagttggcggtgacgtaaccatcataaacaagctgggcggtaacgtaattgtaaacgttaaagaggccagagtagcggtaagcgaagaaatggcccgaaagataatggtttagtttaatatgtaatttatatataaggaggagtattgtatgaacacgctgaagcaggccaaaataggcgaaactgtgaaagttgtcaagctgcatggtgaaggcgcagttaagcgtcgtattatggatatgggaataaccaaaggcgttgaggtctacataagaaaagtggcgccgctcggagatcctattgaagtaacggtcagaggctatgaactgtcacttcgtaaagcagatgcagaaatgatcgaaatcgaatagcaatcaaaaggggtttaatcccctgtatttttagggcacaggttagcttgtgctaattgaggaaagagaggaacttagacaatgaacttacgaatagctcttgcgggaaaccccaactccggtaagactacactgtttaatgcgcttaccggttctaatcagtttgtaggtaactggcccggcgtaaccgtagaaaaaaaagaaggtaaacttaaaaagcatgatggagttaccatcactgaccttccgggtatatactcattatcaccatatacattagaagaagtagttgcaagaaactaccttataggtgaaagacccgatgcaatacttaacattatagacggtacaaaccttgagagaaacctttacctgacaacacagcttacagagctgggaattccggttgtaattgcaatcaatatgatggacgttgtcagaaagaacggcgacaagataaacacagaagaactttcaagacagcttggctgcaaaatcgttgaaatttcagccctcaagggtacaggtgttatggaggccgcagaggctgcaatagacgctgcaaacaatgcaaagacagtgcctatgcatacatttgcaggctgtgtagaacacgcaatcgctcacattgaagaagctgcagtacacgaaatgcctgaagaacagcagagatggtatgcaatcaaaatcttcgaaagagacgacaaggttctttcaggacttaacatcgatgcagaggttaaaaaacacatcgaagaggacatcaaagctgccgagaaagaaatggacgatgatgccgagtcaatcataacaaatgaaagatacatctacatagcatcaatcatcaaggcatgctacaagaaaaagaacgttggacagctttcaacatcagataagatagataaggttgttacaaacagatggctgggactgcctatattcgcagctattatgttcctggtttactacatatcaatggtaacagtgggaacagcggcaacagactggatgaatgacggtgtgttcggtgacggctggcacctgttcggaagcggttcgggacagtatgaaaaagctgccgaaacctatggagatactgaccagatattagacgcattcatttcagaatacggcaatgacggcattgcagatgcaatcgatctcgaaaacgagaattacgatgacgctgcagcacaggctgctcttatggatttagagaagctgactcctgcagatgcaagcgttacatatgaacttgaagatgaagaaacactcgaagtaactcaggttccgggagctacaaaggctgacttagaggctgctgtagatcagtatcttgatactgactacaaggaaggctacggtgctcctgatacatcaacatacggtacatgggtaccaagtattcctgtgcttatcggtaacggccttgaaagcgcaggagcagcagactggttaaacggtcttatccttgacggtatcgtagccggcgttggtgcggtacttggtttcgtacctcagatgctcgtattattcctgcttcttgcattccttgaagcgtgcggatatatggctcgtatagctttcgtactggacagagttttccgtaagttcggactgtcaggaaagtcattcatacctatgcttatcggtacaggctgcggtataccgggcgtaatggcatcaagaacaatcgaaaacgaaagagaccgtcgtatgacaattatgactacgacattcataccttgcggagctaaggttccgtttatagcaatgatcgcaggagcaatctttggcggttcggcgcttgttgcaacatcagcatacttcatcggaatggctgcaatagtcgtttcaggcataatgcttaaaaagacaaagatgttctcaggagaacctgcgccatttgttatggagcttcctgcatatcatatgcctacagtaggcaacgtgcttcgttcaatgtgggagcgtggctggtcattcatcaagaaggccggaacaatcatacttctttcaactataggcgtatggttcctgtcatacttcggaacagtagacggcacattcagaatgcttgccgaagatgagcttgactcatcaatacttgcaggtataggtaatgcaattgcctggatatttgcacctcttggctggggcacttgggaagcaacagttgcatcaatcacaggacttgttgcaaaggaaaacatcgttggtactatgggtatactttacggagcatcaggagatgtttatgcaacacttcagtctgtattcacaggaattacaggatactcattcctcgtattcaacctgctttgcgcaccatgctttgcagcaatcggagctatcaagcgtgaaatgaacaacgcaaaatggacttggtttgcaatcggatatcagtgcgtattcgcatatgcagtagcattaatgattaaccagttcggcggactgttcacaggaaacatcaacgtaatcggcttaatcttcgctgtagcagttcttgcattcatagtatatatgcttgtaaaaccatacagggaagctactaagctgactgcaaaatactaatttgagataataataattaccactatttaagaaaggagctgactctataatgtttacttggattacagaaaacatagcgacaatcattatagcgctggtgcttgcattaattgttgctgccatagttatttacctggtgaataataagaaacaagggaaatcctcttgcggatgcaagtgcggaggctgcccgatgagcggctcctgccataaacattaataaaaaacaagagaagcaggagctttcccgcttctcttgttttttaagcggaaaaaaggagaaacttatggctattgttgaatttaaaaatgtaagccgtatatataccagcggagagcacgaactcaaggctcttgacggcgtggatataaagcttgaagaaggaaaattcgtagtaatactcggtcccagcggagcgggcaagagtacgctgcttaatatgcttggaggacttgacagccctacatcaggcaaaatatatgtgcagggaagagatatatcccagctttcaaaggacgagcttgccgactacagggctgcaacagtaggctttgtatttcagttctacaacctgatacctacacttacagtgcaggaaaatgtggcgcttgtcaaagaaatatcaccggactgctttccggcagaaaaaatgctggaggaagtgggtctttcagaccatctcaaaaacttcccgtcagagctttcgggaggagaacagcagagagtgtcaatagcaagagcgcttgccaagaaccctaaaatcctgctgtgcgatgagcctacgggagcgctggactctgaaactggtgtaatggttttaaagcttttgctcaaaatggcaagagattacggcaaaaccatcgtaatagtaacccataaccagaatatagccaggatggccgatgtggttgtgagagttaaaaacggcagaatacagtcctgtgtggaacagaatgaacctgctgcggcagatgatattgactggtaggaggtgaagcgatgctgcttagaaaattatggagaacaatgggcctttacaaagcacagttcatatctatgattattatgatatccttaggcatgggaatatttatcggcttcaatatggaatgggtaagcattgaaaaaaacacaggcagcttttttgatgatacaggctttgccgattaccgtattgtgtcggaggcaggcttcacaaaagacgaccttaaaagcatagaggatatggatggagcagacagagcatcacgttatatatgtgtaaacgctgatgtaaaaggcagagacgaagacagtctggcccttacagttaccgaaaacgaagatgtttcgggagttatggtggtgcagggcgatgcatatgacagcaaaagcgccgacggcatatggctttcggacagctatgcgggagccaataatatagctgtcggcgacaaactgactttggagtacaaaaactttgagattaaaggtgaagtaaaggggttgattaaagcctcagagcatatggtgtgcgttcgtgatgaaacacagattatgcctgattatgacacttacggatatgcatatatatcaccggtgttttacgaaaaagcggcgggttttgaatattatccgcagataaatgtcatatcggatatggataaaaaagcctttacagataaggtcgatgataagcttgacaggactctgcttatactttcaaaggatgaaaacatatcctatgcgggagcagacggtgaaatagaagaaggcaaaaccatgggttcggtgcttcctgtactttttctgctcatagctgtacttacaatggttactacaatgcatcgtattgcggcaaaggaaaaactgcagataggaacgctcaaagcgcttggatttaaagaccggagaattttaaggcactatacctcatatgcgtttatgataggaattatagggtctgttataggtgtggcgcttggatattttgtggcgtatatgattatgaatcctgacggagcgatgggtacatactttgatatgccggagtggaagctgtatctgccttggttctgctatgtcatacctgcaggtataattctgctgcttacgcttatagggtatctctcagttaaaaaaatgcttcagggaactgcggcagactcattaagaccgtattcccctaaaaaaatgaggcgcctccttatagaaaaaagccatatattcgacagactttcctttggagccaggtggaacctgagagatgcaatgcgccacaaatcaagaatggccatgagccttatagggatagtgggctgcactctgataataacggctactctcggcatgagagacaccatggacgacttcctcaagacatactatgatgatgctacaaactacagctcaagaatatatatagcagaagaggcaacccctgatgaaagagacaagctggcagacaaatatgacggtgactggagttcatctgtaagcgtgcagattgaagacaaggcggtatctctcgatatatatgatacatcaaaggatagggtgagatttcctgccgacagggacggctttgcagagctttccgatgacggagcgtacatatgcaggcgaattgccgatgagtttgatcttgagcagggggacagcattaaaataagtccgtacggctcaaatgacgaatataccgttaaagtggcaggcatcatacgctctgtaagtgagaatatcgtaatatcaccggaatatgcagataagctggatatcagttatgttatggattccgtttatacacagacacctaaagcggatataaaggcggacggcgcgattaagagcgtacagtcaaagcaggccataatcgactcatttgattcgtttatggaaatgatgaaccttatgatattcatactgatacttgcggcagttgttctgggcatagttgtactgtacaacctgggagttatgagctataccgaaagatatacagaaatggcgacattgaaggttacaggcttcagggacaaaaaaataggcaggctcctcatagggcagaatttgtggatttctgtgattggaataatcatcggaattcctgcgggcgtaggtacgctgagctatctgatgactgcccttgcatctgaatatgagttgaaagtagtggtcggacctgttacatacattgtcagtattctgcttacctttggagtttcaatggctgtaagcctgatggtagcgcgcaagaacagacatattgatatggtagaggcgctcaaaggagcagaatagcaggaggatttgcatatgagttctttgaaaatgtgtgacagaaaaactgaaatagaggctgcggggaagagggacaatgccgcaggaggcaatttgcccgagggcgtttccatgactgcctatgatgttttcccgggaattaccgtaatatataacgatatacgcgcggagagattttcgggcaggcgctatgagagcggcagcatttttgaaataaatcactgccgcaagggcaggatagaatacgaacttgcagagggcgagggtgatgaattcagatatcttgctccgggagatttatccataagctgcaggaatgatttcagagaggaagcatattttccgcttcgctattatcagggaataacaattctgattgatacgggacagacaccgggctgtctgtcctgttttcttgacgatgtggaggtgcaccctgagcttctgatgaagaaatttgacaataacggcaggggatatatcacaagatcaaatgagagtattgagcatatcttttcggagctttactctgttccggaggaaataaaaaagggatatctcaaggtgaagattttggagcttctgctttttttaagcgcaatggagccggaggctgcggaggaaaccaaaatggtatcggcagcccatgccagacttgcaaaggatatatgcagatatcttacagagagaatggacagaaaggttactctggatatgcttgcagaaactttccatgtgtctgcaactctgataaaaaactgtttcaaagacgtatacggtgtatctatatactcatacatacggacacagaagatggaaaaggcagctgtaatgctgagagaaacagacatgcaggtaactgaaatagcaggttcgatgggctatgacaacagctctaaatttgctaaggcttttaaggatgttaaaggtgttaccccgggggtatacaggaaaaaacagaggctttaatatatgtccgaacggagcattatcagttctttttggagtggcaggcagaaacggaaaatactataatataaatgtaaaatgcctcagggcatttcatttcgggatagagttagcttatgctaaccaaatagaaaggattagattaatgagtgttgtaataataggcggaaatgaacgaatggaaagaagatacaaggagctgtgcgagtcctactcctgcaagacgaaggtgtttaccaaaaaggcgggaaatatgaagaatctcggttcacctgacctgctggttatgtttacggatactatgtcgcacaaaatgctcaaggccgtaatgagcgaagcaagaggcaggaatatacgaattgctcacagcagatcaagctctatggcggctctcaaaagcatacttgacgaacatatagagggaggcgcatgctgatgtctgaagatatggtaatagcgcagtgttcgccgactatggcgggacttaaaacaggcagtctgttcgcatgtcctgtggaggacagagcagagcttgcaggcagtatgaggagactgaatgcgacacttgtgccgagaggtcttcgaatggtgcctgtgaaatatacggagaacaaggctctgatatatatgtacaggcctgacagactgcagcaggatctgaaagatgaaaccgcaggcagaatacttgctcaaaaggggtatcctctggacaatacaagtcactgcgttgcagagcttgctcgcagacttaattacggcagtgagtttccccatgaaatagggctgtttctggggtatccgtcagaagatgtgtacggattcattaaagaaggctcaggaaatgccaaatatgtaggtacgtggcgcgtatatggtgatgagcagactgccatacgaagattcaggcagtttgagaaatgcaccagagtatacagtgaagtgttcagaaaaaacggttcctttaaaaaactgattgtaaatgctgtgaattaacacaaagaaggaactctcctcatgcagacaggcgccgggaaaccgtatccccaaacagaaggaacgctattgccggctgtctgtctgcagaacaaccaagggaggtgctgacattgaaaagcattaatcttaaaatatgcgacatatacggcgctgaaaacagcgaagacataaagaaggtgctgggatgctcggagggaataaaaaacattataatagatgatgaaacaggaattgcggaaatactttacataccggagcttatatcggttgatgacatgaaaagaactatctatgaaatcggctacagggctgactgaaattcctttacataattcataatatgcggcagggagattattcttcctgccgtatattatttactgcagcatctgtgcagcagtctgattctgcagcaaatttcactgtcatggtagtgccgttttctgagctttcctccgcataaatctcaccgctgtgaagcgagactatctcccataccagcgaaagcccgagtcctgctccgccgtattcccggctgcgggatttgtctacccggaaaaaaggctgaaaaatactttcccggtattctttcggaataccgcagcctgtatctgaaacccggatgataagctgatctgcctcctcggatacgcagatgcggacagtcccgttcggacggttgtaccgtatggcgttttcggtcagattaaagagcaggcggtatatcagggtgtcgctgcctgtcatgactccgtcaccgtcatgctccagacagatacccgcattctctgccagcggcgcaagatctgtaaaaatctcctcgacaagaggcgccagctgaatatggtcggtacatgctactgtgcgcagctcactcatatccagcagtgtttttgtcatctgcgccattttttctgtctgttcgccgagaagccggagaaaatccgatgtgtccgaagacatttctggatgttcggcagtaaacagctcaagctgcgcctgcatcagcgccagcggtgtgcgcagctcatgggcggcattcccggtgaactggcgctgcgcagtaaaaccgtcatccagacggtccagcattctgttgaaggagctgctgaatttctgaaactccggcagcacatcttcggagaacttcatatctgaaagattgttgggatgtatctgctcaacctgtgaggcaaaccggcgcagaggtttcagcgtatgaccgctgagaaaatatgcgataactccgctcagcagtgttaccgccgccgtaatgtaccagttggttgcaataaaagcctcctgcgctccgtcaatgataatagtaagctgctgatccggttctgtccggtcgggaacaaagaattcctgtttgtctttatctgtattgtctgtattgtctgtttcggatatataggtgccgatggaatccatgtaatgtctgcctgaacagcagatcaggagattcatggatacacaggttatccctataagaatgacagtcatcaaagtgatgcgccattgcagagacagtttcttcatattctgtcctcctccattacatagccctcgccgatgcggttgcgaatcggatcatatccgagggcggcgcgcagttttttgcgcagagctgaaatatgcacccgtatcgagttgctgaaattatccacactgttatcccacacatgatccagcagctcctcctgacttaccgggcgtcctctgtgaagcatcaggtattcaagaatcccggtttccttccttgtcagagtaagcgcctgtccggcagcggaggcggtacgcgctttagtatcaaatgtgacctgtccgcaggtgagaactatatcattttgtgtgaactgacgcagggtaagactgcgtatgcgggcctcaagctcctccagatgaaaaggcttggaaagataatcgctggctccggcatcaagccctgctaccttgtcggaaacctcgctgcgcgccgacagaataagcacccttgtatctctgtctgtctgccgcagggtctgcagtactgtcatgccgtctgcccccggcagattcaggtccagcagtacaagatcgtactgctctacagcgagaagtccgattgcttcgtttccgtcatggcagaaatccacactgtaggcaagacgccgcagactgcggacaatagtttcgcaaagcgcgcgttcgtcttcaacgaccagaatatgcataaaaaaagcctccttgctttgtgttttcataatattgaatgtctatattatatcatatggagataagatttctgttaaatttctgttcttaacgcagattttatatcttctgtgttacaatgaggatgcaaagaaaggggtgctttgaagatgaat

SEQ ID NO: 4560 - DNA, 3044 bp, Unknown
  16S sequences of unknown bacteria
cgcttcaagtgcgcggagcactaagcggcgggtgaggggggatgcttatctgcgttcaaattttgagtgcttttctggcaatagaaagtatcaaattcttcagaaatttgatatacttggatttgctaagaggacaggagcaggtcagcggaaggagatatatacaatgtcattacaaaaagcggaacagtttttacagaataaaggctttctggatcatgtgatccgtctggaagagtcgacagcaaccgtggtggaggctgcggaggcactcggtgtagagccgggacggatcgcgaagacaatgtcgtttttacagggagagcaggcggtgctgatcctgaccgagggaacggcccgtgtggacaatcgcaaatataaagatacgtttcacatgaaggcaaagatgatcccgttcgaggaggtcgaagcgaccatcggacatgcgccgggaggagtatgtccgtttggagtccatgaggggatagccgtttatctggatgagagcctgaaggcatttgacaccgtttaccctgctgcgggcgatgaccacagtgcagtaaagctcacaatcgcggaattggagcaggtatgtgacgcaaagggctgggtagatgtctgcaaagctcagtaaaacagaaatcaggattttacgcgattgcctacagcaatgcggagaagcagcaggcaagtaacgatgcattttctgcgaaagcagttggaattaccgaataaacatgatagaatgtttgtagaattgcgggagctgcttcgcagcggagcaattcgtagacatcatagaatgaaacggatagaaagagatccttaaacggacagaggcaggcggtggaaaatatggaaaagacggttggaattgcggaactgacaagtattacttatggaatagcggcatctgatgcgatgctgaaggcaggacaggtgcggatgcttcgctcggcgccgatgtgcccgggcaaatatctgattgtgatcggaggagataccggagaggtcaaggcggcgatggaggcaggtgcggagcttgccggaaagcatttgaggaattcttatgtcatcccgcatattcacgagcaggtactggatgcgctttctaaaaaatcaaaggtggagccaagggaagcagtcggtatactggagagctccatgatggtatctgcgatctatgcggcggatatggcggtgaagcaggcagcagtccgtctgtgccgggtgcgtctgggacaggggatcggcgggaaaggcgtcgtgatcgttgcaggagatgtgggagcggtcaatgcggcagtaaaggcagcgacagatgcgaatgaatcgctgaatctgcggatcacagagcattatgtgatcccgaatccggatccggagctgctcgaattcatctaagcaggtgtattactgtttatccgaaaagggtgatgtgtgttccggctggagagatcagccgggaaagaaaaacggaaggaaaaatgggggtatgaaaaacagaatatttagaggcaaaatggatcagaccttttataaaaagctggcaggtctgatgtttcccattgtgtttcagaatctgatgctggcgtctgtggcggtggcggatgcaatcatgctcggaagtgtcgagcagaattcaatggcggctgtctcattggcaacacagattcagttcatccagaatatgtttctcggggcaatcgttgccagtgtggcgatccttggggcacagtactggggcaaaggggaccaggatacattaaatgatattttctgcatggcgctgcgcctttgtggggcagtctcagtcgtggcatttgtgggatgcgtattttttccgcaatatctgatgcggatatttacgaatgagacagtgctgatcgatatcggcatctcgtacctgcagctggccggctggtcttatctgctcaccggtatcacgcagtgctatctgacgattatgaaaatcagtgagcacgcaaagcagacggcgaggatcagcggcggtgcggtcgtgctcaatatcattctgaatgcggtatttatctatggatggttcggacttccggctatgggcgtgcgcggagcagcgctcgcgacattgattgcacgtatagtggaactgacgtgggcgatcgcatcctcctggaagaaaggatacatccatccgcagttttcgcactttttccgtatcaatcgggtgctggatcaggattttgccaggtgtgcacttccgcttttaggtgcgagtctgttctggggtgtcggatttacgtcttactcggcgtttatggggcatcttggtactgatgcgacagcggcgaattccgttgcggcagtcgtgcgggatctcatctgttgcttcagtggcggtatttcaagtgcaggcggtatcatggtcggaaatgagctcggtgcaggaaaccttgcgcgcggccgggagtacggagaccgtctcgtaaagatttcctttctgtgtggaattacagcgacagtcctgatgctcctcatcacaccggtactgctggcctgtgtgaagctgacgccggaagcgaggaaatatctgaccggtatgctgctcgtgatcgccgtctatatgatcggccgggcagtcaatgatgtgacgattaacggcattttcgcggcaggtggtgatacattatttgatctgtacagtctggcagtctgtatgtggtgtctggcgattccgcttgcggcagccgggacctttttcttccactggccggtcgtggtcgtctatgcgtgcacctgtctggatgaggtaggaaagattccgtgggtcatgtatcattacaaacggtataagtgggtgaaggatttgaccagagaaatggccgtagaggaataacgatctgcggatcaatgtggtgaaacgcacaggtaatgtcaggcagatcgaataaggcgataaaaggtcacagaaatcgtgaaaaacgaaaaataagttgaaaatgttttgaaagctaccgcaatcccattggctttagacaatgggttaaggtagctaaaaatcagaa

SEQ ID NO: 4561 - DNA, 12369 bp, Unknown
  16S sequences of unknown bacteria
agtggggacaagatttccgtcccagctatttaaaaatagcgcaattcattcaatctatgcccaaacgtcctattatcggcgcctttacagccactgctaccagagaagtaaaagatgatattatttctcttttagcattgcagaaaccatttgtcatgacgacaggatttgacagaaaaaatttatattttgaagtacaaaaacctgttgataaatttacggcattggaacgatttttagaacgaaatccaaacaaaacaggcattatttattgtacaaccagaaaaggtgtagaggatgtttgtgacagactgatattacaaggctatcgggcaaccagatatcacgccggtttaagtgacaaagagcgaaaaataaatcaagaggaatttcaatttgataaggtacaaattatggttgcaaccaatgcatttggtatgggaattgataaatccaatatttcttatgtcattcattttaatatgcctaaaaatatagagagttattatcaagaagcagggcgggccggaagagacggtgaaccggcacaatgcattttgttatacagtaaacaagatgtaagtacaaatttatttttgattgaaaaggacaaagaaaacgaagaattggatccgattacacgtcatgaagtattggaaaaggatagagatagactcaaacaaatgacttattactgcaccacaacagactgtttgcgtgcacatatgcttcgatattttggagagcaaagcccaaatttttgcggaaattgttccaattgcaatgcaaattcaaaagaaattgatattactgttgaggcacaaaaaattatgtcatgtattatcagagctggggaacgatttggtatgttgactatcattgatattttacgtggaagtaaaaatgaaaaaataagaaatagccatttagatacactgactacctatggaattatggaatctgttcccaaagaatatatcagacaagttatagaatttttactggtacaatcttatattcaagcaactaccgatgggtatcaggtattaaaaattcaaccaaaagcttatgctgttttacgaggtcagcagtcacttcatatgcgtgtgttgcaacaacctgacaatatggaatcttctgttcctacttcttacgtggaaattgatgaggaattattccaacaattaaaagcactaagagcaaaaattgcaaaagtacaaagtgttcctgcgtttgttatttttacagatgctgccttgcgagatatgtgcatcaaattaccccaaaatttaaagtcctttcttgaagtaaatggggtagggcagacaaaggccaatcgctatggagagcgatttatcaagttaatacaggcttactgccaaaaatcagcaaacatagagtaataaaaagccattacagtttttactgtaatggcttttttgagaggaagtcatttataccaaattattcttcaccttcatcaaattggctattataaagatttgcataaaaaccacctttggcaagcagctcttcatgattaccttgttctataatatcgccgtctttcataaccaaaatggtatctgcatttttaatggtagataagcggtgggcaataacgaaactggttcttccttccattaaatgatccattgctttttgaattaaaatttcagttctggtatcaacactgcttgttgcttcatccaaaattaaaatttcaggatctgctaaaattgcacgagcaatggttaataactgtttttgtccctgagatacgttatttgtttcttcattcagcatggttttgtagccatcagggaacgttctgacaaagtgatctacctgtgcagctttcgctgcttcgattacttcttccgttgtggcagtctgtttaccgtaacgaatattatcttcaatagaagcattgtacagccaagtgtcctgcacaaccattccaaacatagaacgcaagtcttttcttgcatattctcgtaaatcatgaccgtctactaaaattgcgcctgaatttacatcatagaaacgcatcagcagttttactatggtcgttttacctgcacctgtaggtcctacaatagctactttctgtccgggctctactacggtcgagaagtcattgataatggtacgttccggtgtatatccaaagtgtacatggtcaaatacaactttaccttttggtttgatgcaagtagcagtttcaacaccgtttggatcatgctgtactgtaatcggattctttgtttcaggaacttcttcttcctgttctaagaaattaaacacacgttcagcagctgctgcggtttgctgtaaaatatttgagatattggcaatttgagaaattggctgtgtaaattgacgtacatattgcatgaaagcctgaatgttaccgacaggcaaaccggttgtaacagataaataaccacccaaaatacaaattgctacataacccaagtttccgacaaacaagataataggcattaaaaggcctgacataaattgtgatttccaagcagatttataaagtgtattgttgtacttatcaaaggtttttgcagactctttttctttgttaaatgctttgataacaacatggctggaatacatttcttccacatgaccattgacgtgacccaaataagcttgttgtgccataaagtgtttctgagattttttcataattaaagaaataatacccattgaaataggcacaatggccaaagcaaccaaagtcatttcccagctgatggtcagcatcataatcagaataccgataatagtagttactgaagtgataatttgtgttgcgctctggttcatactttgggaaatcgtatcaatatcattggtaatgtaagataagatttcaccatttgaagtaccgtcataatatttaaatggaagacgatgcatcttattggaaatatcttttcttaaattatatgttaccttcattgtaactttggacatcaaatgtccttgtaaataaccaaataacaaacttaccaaatacaaacaaattagaataattgcaattgtaccgatatatccaaagtcaataccggttcctgtaccggagacactgctcatgatgccttcgtacaattttgtagtagccatacctaatattttaggtccgacaatggtaaatattgtagagcacacagcaaaaataaccactagaattaatagcactttaaatttgcccatgtaacgcagtaatttaccaaaagaatttttaaagttttttgctttttctccaggaacagcggcgttcccaccaaacattgcgccacccggttttggagaagtttttgtattttgttcttgattactcattgtctaactcctcctttgaaagttgtgacgaagcaatttcatagtaggtttggcaatttttgagtagctcttggtgcgtacctttaccaacaattttgccttcatccaaaacgataatttgttctgcattcataattgtgctaatacgctgtgcaacaatcaatacggttgcatttgaagtatgttctttcaaagctttgcgcaaagcagaatctgttttaaagtctaaagcagagaaactgtcgtcaaaaataaagatttccggtttctttgtcaaagcacgtgctatggacaaacgctgtttttgaccgccggatacgttggtaccgccttcagaaatagggctgtcaaaaccatccggctttttcataataaagtcggtagcctgtgcaatatctgccgcaagttttaaatcgtccatagttgcattttcgtctccataacgcaagttggaagcaatggtaccagacagcaaaacacctttttgcggtacataaccaattttgttatgaagctcatgttgagatacatcttttacattcacaccatcaattaaaacttcacctgaagttacatcataaaaacgagggattaagtttaccaacgtggatttacctgaacctgttgaaccgataaaagctgttgtctgaccgggttttgcagtgaagttgatattgcttaacacttcttcatcagccccggcataatggaagctaacattgcggaattctacaacaccatcaatgctgtcatcaaaatgtttcggttgaacagggtcttgaacgcttggttcttttccaagtacttctctgattctggctgcggaaacagctgcacgaggtacgataataaatacaatggaaagcattaagaatgcaataataatttgcatggagtattgcatgaaggccatcatgtcaccaacttgaataccgccgtttgcaacttgatgtgcaccaatccaaacaacaagtaaacaaataccattcatgataaaggtcatagcaggcattaaaaataccataacacggtttgtaaataattgcgttttacttacatccatatttgctttatcaaaacgtttcttttcaaaatcttccgtaccgaaagctcgaataacagtcatgccgtttaaattttcccttgcaaccaagttcaatctatctattaatttttgcataattttgaacttaggcattgcaatgacaaagatgactccgaccagtaagaacagcaatccgcatgccaaagcaataatccaactcatagatggggaagagcctacagccataacagtaccgcccacggccataacaggggcataacatatcatcctgatacccattaccaacaataattgaatctgtgtaatatcgttggtagtacgggtaatcaaagaagaagttgtaaattcgtcaaattcattattagaaaaagaagtaacttttctaaatacatctctgcgcagattgcgtgatacacctgctgcaatacgggaagccaataggcaaaccaaaatagatgcaataccacctgccagtgacaatgccagcattttcatacctgcaattacaatgtatgttgtttgtatgctggatttgttttgtccaagctcttggtaaatattaccgtttaagatagctgcactttgagagagcatagaggattctgtattttctgcctgtactcttgcatcatcaatcacttgatcaggcattgcctccagctgtggttgcatttgatagagttcttcaaaattaatatccgaaatactactgctgctggaagtatcttcactgtcaggttgtgctgcagcattttcattgcttgacatagattgcatggtataaatgaatgtccatgttgccaaaccgaatgtatgatccaattgagacatggtatcgctgtctatgttactgttcaatacataaatatcttgtgtagccagcaatggatattcttttacgtaacggtcatgttcttgaccttgatcgttaacagaacgaagcgtataactcttatcaataacttctttttcttcgtctgtcataaacactttcaaaaacgaaagtgctttggcacttattgccttaggtgtagattctgaaataccgccctgctgaataccaacatttacaatgtcagacatgtaatgtggtaagctcaaatcactaaatgcttgaccaaacaacagcaaaacggcaaatactacactcagccaaaaaggctttaagtactttgcgagcaatttcaccatatgagcatgacttcctttcttaaataggtttaaattttgtcacaggatgtgccttcatagaagattacttgaaagcgattaagaagttcaataaattttcttgtgtctttttctccaaaatcttcataaattttatccacaacggctaaaaacatctttttggatgtggacaaaatttcttttccttgttgggttaaacacactaatactttccgtcgatcttcttcaaccatgactcttttgatatagtctttcttttccaaagcttttaacatttgagaaacagccggacctgacatctggctaacttcccttatcaaagaagcttctactcctcctgttgatgaatcttgatatcgctcaatcattcccagtgtaaaaaattctcccggggcaataccaaacattgcaggaaaaggtcttttatatcttcttaatcctcctaatacttctgccaattcttcttttaaggcattggcatcgctcatgcctgaattcaccccctcaattaacattattaataattaataacattaataattaatatcattaacttattatactctcaatgaagcgattgtcaacagtatttgaaaaaaatgaaacaagtttaacacaaaatatacgataaaacaaacatattctttacatataactactaaatgcgctatactgtttatgggaattttttatatggaaaggggggaaagatttatgcaggaaaaaataaatttagcaattataggcggaggtgcttccggactcattgcggccattacagcttcaaaaatatgcaaacaaacaaaacagattacaatttttgagggcgcttcgcgggtaggaaaaaagctgcttgctacaggtaatggaagatgtaatttaaccaatatacatgcaagtgcaaaacactattatggcgataccagactgattgaagctattttgcgtacatatccacctcaacgggtcatacaatattttgaagaaattgggcttctttgcaaagaagaatcggaaggccgtatttatccttatagtttacaggcctcttcggtactggatgtgttgcgttttaacgcagaagaattgcaagtggaaatcatttgcgattgtcctattcacaatattcagtcgaaaaatggtatattcattttagaaaatcatcagcaacaaacttttattgccgataaagtaattttggcaaccggaggaaaagcttcacctcaactgggatctgccgggaacggatatactttggcaaaacagttggggcatacggttacaccgttatatcccgcactgaccattttaaaaacgccgccggaatatgtgaaatctttaaaaggtatgcgaagtcatgttacagccacattaaaatgtaatggcaaagccatacgacatgaaaaaggagaagttcaatttacagagcaaggtttatcaggaatatgtatgtttcaattttcccgtcacgttgctcatagtattgcgaataaacagaagattacaatccttttggattttatgccggaatatagtgtatccggcattgtaaaccaattgaaccatgcagtaaatctatttcctcactttcccgcaacggagatattaaaaggtttcataaataaaaaggtaggggaaacgattgtaaaaacagctgttcctcagtccaaagaaatgctggcagaacaattgacaaaaaccgattttatggcaattgccaatgctgtcaagcaattttcatttccttgcatcggagtagctgactggaaacaggcacaagtgactgcagggggagtttcactgtcacagttaaacagctctttggaatcaaaaattcacaaaggattatatttttcaggtgaattgctaaatattgacggtgattgcggcggctacaatttgaactgggcatggattagcggaattacagcaggaaaagctgcagcaaaaagtttacgccataaagataaagcgaggatatcaactacatgataagagttcctgaaattaaactgccattggacagtacagaagaagatttattgttttatactgcaaaacaaatgaagacagatgtaaaagaaatacaatccatacaattggtcaaacgctccattgatgcacgaaacaaacagaacattcattttatatgtacagtggatgtagcactcaatcatgaatctgtatttatgaaacataacaaaaattctaaaataaaatatgttgcgccgtatgaatataccattcctgccacaaaaaagctggaaacaagacctattgtagtagggtttggacctgcgggaatgtttgcggcacttatcttagcacaagccggacaaaatccgattgtaattgagcgcggaagtgctgttgaaaaacgacaagaacaagtgttttcattttggtacggagaaaagctaaatcccgaatccaatgtgcagtttggcgagggaggagccggaacattttcagacggaaaattaaatacaggtacaaaagacggaagagccagaaaagtattattagaattggcggaagctggtgctcccagcgaaattttgtatctggcacatcctcatataggaacagactatttaccaaatactgtgcgaaatattcgtaagaaaattatttcacttggaggtgaaatacatttcgatacaaaattaacgaatattactgagaaaaacggagctatttcctctattgaaatacaaactcaaaatggtacttctactatattagaaaccaaacatctgattttagccattggacacagtgccagggacacctatgaaatgctgtataacagcaatttagtacatatagaacaaaaaccattttcaattggggccagaattgagcatccgcaatcactaatcaatcgcactcaatttggtccttatgaaaaacatcccgtgttgggtgcggcggaatacaagcaagcggtgcatttaaaaaacgggagaggcgtatatacattttgtatgtgtcccggaggtattgtagttgcgtcggcgtctgaggaagggggagtagtgaccaacggaatgagcaattttgctcgtaatggaaaaaatgccaatgcagccttgcttgttggcgttggtccttccgattttggagatgtgcatcctttggccggaatgtatttacaacggaagttggaacaacgcgcatttgaattaggcggcaaaacatatgcagctcctgtccaaagagtagaagattttattgagcgtcgtgcaagtacacgattaggagatgtaaccccaacgtatcagaggggagtggttccgtgcgacttatcctcctgctttcacgaagaaatttatgaatctcttcgtgaaggaattttgaaaatcaatcacaacatgaatggtttttcatatggtgatgcactattgactgctgttgaaacgcgcagctctgcgccaattcgtattttgagagatgaaacacttcaatcggttactttaaaaggattatatccttgcggtgaaggagcaggatatgcaggtggaatcgtttctgccgcagttgacggcatcaaatgtgcggaacaaattttgtattctgccttacaataataaatggtagtcccttataaattcagcaaatggcaacaggtataagtacctaacattcagctatttttattaggaattaaaaaataagggactatgcttgtaacatataaaaataaaagaaaaacacctgttttgataagatacaggtgtttttcttttatctaatataatatatattatcggttcgtcttggttttgcaggtgcaggtgcatcctgttcgtatccaagtactacacaagcgaccggttcatatccatccggtaactgaaatcttttttgaatatcagaatcaaaaattcccaaagcaattcctatgtagcaacttccaagaccgtatgaatgcgctgcatgcagcatattcataatagagcaagctacatcctctcgacccagtttggtatctttaggcgcagaacaaacaataacagttggagctaaataaaatggcatattgggacgtgtaggagtaaaacctccattttccatcatttgcagcgttttatctgaaatttctttgataaaatcaatgtcttgaattacggtaaaaaatcgcttttgctgattcatggaagatggggcatactgtcccgctgttaaaactgcttgcaagatttcttccggcacttgtttattcggtatatatgactttgtggaacgtcgctcaatcaaagccttggtaaattcattcaaactcattgttaacaccttccttttttctttattataaatcttttttttcgtgttaacaagacatgctgtactgtttattttacgttccggataaattttaagttttctattgacaaacaacaggaatttgatataattatttacgctatctttaaatattgcggtattgtgtaatggtagcacagcagactctgactctgtttgtctgggttcgaatcctagtaccgcagccaaatagttatgcaaaaaccccaaaagaatattgacaaacgttcgtttacatgatatagttaataacgttgtcaaacacggaggagtgtccgagtggtttaaggagctagtcttgaaaactagtgatctcgcaagggaccaagagttcgaatctcttctcctccgccatcttgtctattacattttaatatgttttcataaatttcactgttttggagaaatactcaagtggtgaagaggctcccctgctaagggagtaggtcgggtaaccggcgcgagggttcaaatccctctttctccgccaaaagtcgctaacctgctgggtttagcggcttttttgtttttacttttaaattgcaaaaatggtgggaaattgttaaaaattttgctgttacagtatatggcgcttgataggtaggaaaaacgtctacaattatctcctttctaattaaattgagaagaaaacagagtgcaacgtgtgaaaattaaacacaaacaattgtttgtttcctgaaagtattatataaaatgttatattacataaatattctatttaaaaggagaaaaagtatgaaaaaagtattttttgttttagctgcctgtgctgtagtatcggccgctttagtaggttgtggaagcagttcctcgccagaaagccaaagtgtagctacatcggataatgctgtagcgcaaaataaaggggatatcgggccgtatcattttgaaattagtgatacagcaagaaccgaagaaatcacagaaggcactgctttgattgtaaaatacacgattaccaataatagtgatgaaacaattactcctggtagtgtaactcgcctccaagtattccaaaacggagtttcgttgagtggcattaccattataggtgccgaaaacggagctcttatggataatgagtataaatctattcagccaggtgcttctattgaagtggaagaggcatttacgcttgacgatacaacaatgccaattcaagtgtctgctgagatgaaggcagtacagcctaattccattaaacttatagatggaattctaaaagcagatatttctgttactgaataacaacagattcattgataccacattgttatatattaagtgtgatatttttattgaaaaaaattacttttattttgttatacgcaatacaaaattataaaagaaactgcagaaactaaaaaataatcaaagtattttttgatacaagacgctttcatacacttaccctgaacgtatattttgatatactttcaggtatttcttctgattttactatatgggaaactacctattatcgcagaatgaaatctcatggcagtattagagaatggtataggggaacaggactgagaccttatttgtccgcattaaacacaaaagagctgcatgcattcgaggaagaaatattatgtgtgttagccaaaacatatcctgttcagccaaatagagaaattatttttaggtttcccagactatttatcattgcaaacatataaaatgaatggttattaaaaaaagaaacaggcggattgcgatttatccgcctgtttcttttttaattgattcgtccacccaactctttatcaatagagtattttgctgaagtgctttctcctgcaaatgtaaatttatcaatgatatcttgtgctgtgtcttcttcttgaatttgttcattaatgtatttatgcataaaaatttcagtcgcataatcattctcttgttttgccaagtcatgtaatttataaatagatttagttacgttgcgttcatgctccagtaccaatttagcaattttcagagggtcagtttctttaatcggctcaacctgaaccggttttaattcaacagacatatctcgctgctgcataaaatgaataaagtcatgagaatgttcaaactcttcttgatactgcttaaagagccatgaagaataacctttgtaattttcttcatgtgtttttatggacattgccaaatataaatatccggaatacatttctaaattaatatgttcattcaatgcttttactaactttttacttaccattatgcttgccatcctttactgtaattttcatacctacgaaataggattgaatgatttgtggctattgtatatctttcattcttttttgtcaagatacgatatgacacaaaaaatgtaagttttttgaatcttttcgcacacatttcttcctattcttgacaaagatttc

SEQ ID NO: 4562 - DNA, 1784 bp, Unknown
  16S sequences of unknown bacteria
caggttacacaaaatgcggccccaaaatccgggccgcattttttatccgttagtctttgaaaggaacgccgtgaccaaaggaaccttcgatcatgcaggatttggcggaataatccgccgcaaattccaacgcctttgtgataatctcggatttatcctccgcgtcgtaaccgccattgtcaataaactgatacaaaaacgcggagataaacgcgtcgccggcacccatagtgtctacgaccgtctccagccagtggggcggctgatggtagaaatggttgccgtcatagcaaatggagcctttgctgccgcgggtgccgatgcagattttggcgccgagcgtatgtgctttgagcagccgctcctgggtttcagtctcgctcaaatggctacaggagagcaggacaaaataagcgttggggcagatttcttccatatacccttctttttcatgggtcaaagaaaagtcaaaggaaattttaatcccctgcgccttgaaatccggatagtaagcttcgattccgctatcattggagcagtgaacaacatcgaaggatttgatatacgctatatcctcttctgagaacccctcgtaatccaacatggaaaacagcgcgcgggtcatggggtttacttttttgggagggcgcacaaaaacccggtcgttatcaatgacccgatagtgggcacaggcgttgggaaccggataggtgtgggagtgggaataatcgatgccgatttcatccagagtctttttcatgtgctctgccacatagtcgttgccgaagcagccgatgaacgcagcctgtgcgcccagaaaatgcatattgaccgggatgttcagagactggccgccaggatacataatgccggtggtcaggtttttatcgaccatgctgtcgccgatgccgatgacttttaccataattataccctcatttcactgatattgtctatcatctgatctattgcgctaaacggcaagagccgtatggaactaatcttcactggcaattttgcagccgtgcccgaacgcaccgggcgtcatgcaggctttcgccgcccaggaagacgcataagccagcgcatggcggattttttcctcccgctgctgttccgtgcgggcctgcagcccctgagatccgacaaagtccacaaggaaagcggaaatgaacgcgtcgccggcgcccatggtgtccaccgcatcgcacaagtcgggcttctgcatataaaaccggttgccgtcatacagagttgcgccttcgccgccgttggtagcaatggcaatgcgggtgcccaacgtgtgtgccttgaccagcccctccatcatttcggtgccggtcattttactggcggaaaacaggctgatatccacataaggcgccaccttttccatcaatccgggctttagatggtcattggaataatcgtaggacactacaatccccatcgccttgagctggggcagatactcgtccatatgggcagtattgcaaagatgggccgcatcaaaggttttgatatacgccatatcctcatcggaaaggccgtaaaacggcagcataaaacgaatcgccatctgcagaggggagatcggccggggattggttccaccccagacccgttcgccgtcaatgacctgatatttggtggcggcgttgtctgcgtgtacaatatggctgtggctgcggtctacgcctatttcgtccagcgtctttgccagatgctgccccagcacgtcatctccgatacagccgataaagccggcctgcgctccctgcagc

SEQ ID NO: 4563 - DNA, 29458 bp, Unknown
  16S sequences of unknown bacteria
ctcagttcggcatagtcgtctcccttcgctcgcagagctcgcttgggatactccttgcctcactgggcttacttcgcgctgtttcgcccactgggcgcgcgcttcgtgcgccccaaaatggtcttacccgcctgttgcgcaacgcccaaatcggacgccgccaggcgggtaagtgatctatgaatgaaaaaggaagatttcctttgatgcttatactataccagatgaatgtgtgccaggtatagccaaattgcaaacaagctgaaacaaatttgggctagccgccccgatgttccttccgctaaaagcgcaaaggctcgtttccatccagtggcagcaacgcgcgctcatagtctcgcacaaaataccgcttgttcgttcggcccttttcctcaatgctatgcccctcggcctccaacttttcccgctgcgcggcgacgccaccaggatatttggggttcaattcgccgccagccttcagcgtacgccaatagggcgtttcgtcctgcgcacgctgaaagctggcccatgccgcgatgcttacgaaaattcccgccgtgagcggttccgtgaaatccgcgccattttgccgggcaagatagtcccgaatctgcgcgaccgtaaggagcttgccaaacggcacgcgcttcatgatcgcgtcgtactgcgcgggcggcgcaaaaaacatgcggctgccaccgtattttgcgatggttttttcgtccgtcacgatctggatcctaggcatatcccgcgcttcgcgaagcatcgcgttgaaatccttgtttgcctcattcgccatgcgtttgctcctccatcttcccttccagccaatcgagttgcaggcacttttcgatcaagtcgttcacggtgtagaaataatggttgctggcctcatagcccaggcgcgaatcccgcgcgcgcagagcgagcagccgccggaccgcgtccttttcgctggcgatggccgcgcgcatgcccgccacgtcatccgcgttgcgggcgcgcacaaagcggatgtggttatacgcgctttcgaaatggcacagcgcggcctcggccacgcgcgccatatcatcaaaatccgcggaagagcccttgccgccttccagcaattccacgcccgcgcgccaaccctggaccagcttgccaaactgcgcctccaacacttccggcggatagatgccgcgccagccatcaaggtcatcgtatggaaagcccaccatcgtggcattccagccggtcttttccgcataaaacggcgccatggggccgaaattctgcggcgcatgataggccacggaaatgtggaaaggaaattcgccaaaggcttcgctcatgcgcttttgcgccgcataagccatctcgcctgctgtctgccccagccaatcccgcaaaaacgcgcgcgcgtcccgtccgcccatacaagcgaaacgcaaggtaggcgaaggataaccgcccagcgtccagctcaattgcaagtggcgcacgccctctttttccaggttagcgagcagcgcctccactttatcgaatacaggaagccaaggcacggcggccaattcccaggtgttgttgatctgcaccttggcgcaggtttccagaccgcgtgcgcgcacggcgcgccacagcgctttggccgtttcgccagggccagtctgcgagagcgtgtagtccagcacgctgccttccacgccgcccacaaaagtggtgagcgcctcttccgctgtgcactgcacgatctgcccctccgtgagccgcgcgacgatctctcgtccccaatcgccccatgcccagctccaggcgatggcgcgagcggcggggttggcgcgatgcgcgccgcgcgccagcagattgttcacctcggccaccacgtcccagggctggcggacagagcagcgcgggcagccgcccgcatcctgcgcgcgagaataacaatttgtgagattttcactcatggaaatcgtaaagaatcctgccagatccggcgccgcgcagaacaggcggtaagccgcatcctctagataggcgcgcacctcgtccgtggaggtacacatggcgcaaaaatcgccttcgcgcgcgccgcgcaaatgcggatagcgcgcaaagaaggcgtccggcatggagcgcggctcgttcagatacaaatacacgccgatgccgtgccgcttcgcgcgcgcaatcagccggttcagcgccgcgatgcgcgcttcccagcccgtggagagcgccggatcgaagggaaagggcgtaagctgatagaggatgccctgcagccacacgccgcgtacgcccatgcgcgcgtactcggccagcagcgcgtccggaaagggatcgagcgagggatcgctgagtggatcgccatagagggcgaaataggaatacacagtgcgcagccgcccgtcgtccgcctctcgggaaaccggttgcgccgggccagaaagcgccgcgacaaaatcaaacccgttttccctcgtgcgcaaagaacgcacggtttgcgcgatggcgcgcgtgcgcgccgcctcttccggcgcgagcgcgcgatagcgcacgcgctcgcacagcggcttgagcatgcccagcttgtgccagagaaaatcgtcttccttgagcaagaacgccagccgttcttccggcatgtccaaaagctggaggagctgatcgaacgggcacaggtgccagttgttgcggatgatggtttgatagccgcgcgcatcccagcagggcgcggcgtccacagtgggatccaggcccagcgcttccgccgctgcgcgcgcctctgccggggagcaccccagcgcccgcgcgatccgcgcgcagggcacgacgccccaattgcggaaaatcagcgcctggaaccgcgcgggaaaatgcggacagcccagcgcggggcgtggactggtttcgggcaatgtgggcatggaaaattcctcccttattaaagctctcgggggctaagaaaagctgcgccgcaaagggatggatcttttgcggcgcccaaagtcttaccggctgccctggtcatacggcacgccgctggcgcggggcgcctgggagcggcggctggtgaaagccagcaccacgagcgtggcgatataggggatcatcttatacacattcgagggaatgcccaggttctgcaggccggggatgcccgaataggaggctgaaatggtcttcatcaggccgaagaacagcgccgccagcagaatgcgcagcggccgccactggccgaagatcatcaccgccacggccaggaagccatagccggaaacggtggcgttgaaattggtggaggtggggatcacgaacaccagcccgccgatgcccgcgaacaggccggagagcatcacgcccgcatagcggattttgtaaacgttcacgcccacgctgtccgccgcctggggatgctcgccgcacgcgcgcaagcgcaggccaaagcgggttttatacagcaaaaacgcgctgatggccaggatgatcagccccagatacgtggtaatataggcttctttaaagagcagatcgcccaacacggggatatcgcccagcacaggcacttcgcgcaggcggaacacgttgctgaagttcacctgctgcacgccgttgtcctgcagcgtgcgcgccatatagatggcggcggcgggggcgatgaggttgagcgcggtgccggaaattgtctggtcggcgcgcatgttgatggccgcgtaggcgtgcagcagcgaaaacaccacgcctgtgagtcctgccacgccgatcgcggccagcaagatccattggccccaggcgttcatctgcacgctggcctgcgtgctggccagcgactggatggcgcgcagcgcatccacatccgcgcggccatcgatggtcaaaccgcccaccacggcctccagctgtgcgatcagctcctccgcgttgctcagcgcgtaggcgttcggcgaggcaaggaaggaatccagcgtggcgcgcgccgtgtcgatgtgttcctgcgtgagcgcgcttacgcggcccatctgcgaaatcaaagaagaagcgcacgcgcccaactcgcccagttggttgagatgctcggtgtaaaagcccatctgttggatccggttgatgaagaaaatcgcggcaaatgcgcccatcaccatgatgccttccagcgcgatgttcaccacgccgctgcgctcggaaaacatgccgcccagcgccacgatgagcaatgggatggagaaaaacatcatttgccggaacacgaaatacaccacatccatggcgttgctcatttcggttcgcccccttcctccctgcgcgattgccgcgcgagcagccacttgctaagcaaccgcttgaacaagagcgagaacgcgctgaaatagatgatcgcggcgatgatgatgtcgatcacctcgggcatatattccagccgctgcaaatagaaaccgccctgctcgatatgcgcgatgaacaggcccgcgaacaccacgccgatgggattggagaggcccagcagcgccacgggaatgccattaaagccctcgggcgaaaggatctcctccacgcgcatgtgcagcccgctggcgggcgccaaatacatcagtgcgcccgcgcagcccgccagcgtgcccgcaatgaccatggacagcgcgatggtgcgcttttcattgatgcccgcatagcggctggcgtggcggttgagcccgcacgcgcgcagttcaaagccaaattgggttttatagagcagcacgaagatggcaatggccatcaggatcgcgatgaagatgccgatgttcacggtggaagcgtccgcgtaatcgccggtatagttcacaaaaatctggtccaggccgcccttgggaatcacggcggtgccggccacgcttaccgtctgatttttcagttggtcgtacaccgtgcgctcgatcagcaaattcacgccatacatgccaatgtaattcatcatgatggaggaaatgacctcgtgcacgttgaacagcgccttgaacaagccgggcaccagcccccacaatccgcccgcgagcatggccatcaggatgcccacgatccagtgcgcggcgtcgggcagaaacgtccaatttacgcccacatacacggccacaaagccgcccaccatcaattgacccggcgcgccgatgttaaacaagccggttttgaaggcgaagcccacggaaaggcccgtcataatgatgggcgtagcgtaatagagcacctgccccacgccgcgccagctatcgcccaagccgcccatgaggatcgtgcccagcccgcgcacggcctgcgcaggattgctgacgagcagaataaggaagccgaacagcagccccaccaggatggccatcacggaagcatacgcgctcatcgcgcccgggctgacgagaaagccggagaactttttcttcatttgccatcctccctcttcgaaccggccatgtacagacccaattcctgcaccgtagtcgccgcgggatccagttccgccacgatctggccctcataaatcgccagaattcggtcgggcacattcatcacttcgtccagttccagcgaaatgagcagcaccgccgcgcccgcatcccgctgggcgatgagttgccggtggatgtactcgatcgcgcccacgtccaagccgcgcgtgggctgcacagccaccagcacgcgcggacgcatgtttagctcgcgcgcgacgatcgccttttgctggttgccgccggacatggtgcgcgccaccgtgtacgcgccgcgcgccgagcggatatcgaactgggcgatcagcccggccgcctgttcgtacatgcgcgcgtattgcaaaaagccgtgccgctggatgggcggttggtggtaatttttgagcgccaggttttcggccaggttgtaatcgagcaccaaaccgtctcggtgccggtcttcgggaatgtgcgaaagcccgccatcgttgcgcgcgcggatggaagcgtgcgtcacatcgcggccggcgatggataccgtgcccgaggcgatgggcgcaagcccagtgatcgcgcccgccagctcgctctggccgttgccatccacacccgcgatgcacacgatctcgccgctgcgcacggcaaagctcacatcgttcaccgcgtttttgccgtgcggccccttcacgcacaacccgcgcacttccagcgccacttcgcctggccgcgcgggcgctttttctacgatgaaattcactttatgtcccaccatcatttcggaaagggtttccttgctggtggtctttacatccacggtgccgatgcaacggcccttgcgcaaaaccgtgcagcgatcggcaacctccttgatttcgttgagcttgtgggtgatgaagatcaggctcttgccctcggcggcgaggcctttcatgatcttcatcaattcgccgatttcctgcggcgtgagcacagcggtgggctcgtcgaagatgaggatttcattgtcgcgatagagcattttcaaaatctccacgcgctgctgcatacccaccgtaatgtcctcaatgcgcgcgtccggatcgaccatcaggccatattgccgggaaagcgtcatcactttctcgcgcgccttatccatcttgagcacgccacgccgggtgtcttctacgcccagaatcacgttttctagcacggtaaagttgtgcacgagcttgaaatgctgatgcaccatgccgatgcccaaggcgttcgcgtcgttggggttgttgatttttacaatctgtccgttcttgcggatcacaccgccgtctggcggatacaggccgaagagcacgctcatcagcgtggatttccccgcgccgttttcgccgagcagcgcgtggatttctcccttttccagttgaagggtaacatggtcgtttgcgcggatgccgacgaattccttcacgatatcctgcatttcaatgacatacgccaaggccatccctcccgaatctttttccggcaaaacgcttcgtattttgccgggcacgcgcatggtgttccttccggcaatggaagcctgaaaccaagacgcggcgagggagcagcgctcccccgccgcagcagtgctacttcatacggttgtgccatttccccaaagactagctgtcggcgttcgccgactgaggggttggccgcgcccttgtgcgaggattactcgataatggtcacagccacaatgctggtggcgatgtccgccgcggtggcgggctggccgttatcctcggtggggttggtggggatggcgtcgcagatgccgttctcgttcgaggcgagcttggcatacacggcgtcgtaatcttcctgggtgaagttcatgaacttgctggtttccatgggcagctgcacgccgttgttggaagcgtccttcacggtggtgacgccgccggggaattcgccggcataataggccgcgatggtctgatacacgctatcgcccaggcccttcatggccgaggtgatcaccgtttcgctctcgccgctctggtcgacatccacgccgatcacgtatgcgccagccgcttccgccgccgccatcacgctgttgcccacggcgccgccgcaaccaaagatgacttccacgccgtcattgtaccaggccgccgccatggactgcgcctcgggcgtagcattgaagctgccagtatacgtatagttgacggtcacagaaccggcctccaggcccatttccacagccgcgtcatccgcgcccttcacaaagccatagccaaagcggataaccgccggcacctgcatgccacccatgaagcccagcttggtgaaaccgtccttgacggccgcgtaaccagccaaatagcccgcctgctgctcggcatagaggatgggggcggtgttttccttggtttcataattgtaatccgcatcgtgcggctcgccatcgagcaggatgaaatgcacgtccggatacagggactgcgcctcgtacacggaaacctcaaacagataccccggggtgacgacgatcttcgcgccgccgtccaccgccagcttgatggtggcgaggtagtcctcgtcgctctgctgcgggggctgataatacttgtaggtaatgccattttcctcagcgtactgcatcaggccttcccacgcgccctggttaaaggatttgtcgtcgatcgtgccaacgtcggtcaccagcgccagctcataggtttcggcttcctccgcaaaagccggagccacgccgagcgccatcgcgagcacaagaagcatcgcaagcagtttcttcatgatggaatcctccttatcgattttgggaaccgtacccattataccacaaacccggcaaaaattgaaccccccgcgcgaaaaaaaacgcgaatccgccgccggatgcgcgacttttttcttcgaatccgcccaggcaaatttttttgaaaatcccggtcaaaatacggaacttttttcgcatggcctgcgtctaaaatggttacacaaagctttttacagaaaaacgccagaaagaagggattcccatgcgcgttcacgaagaaacgctcgcacatgttcgcgcgctcgtcgcccggctacaggctgtgccaaacggcttttacgtcagccgccttgcgggcatccacccggaagacatccgcaccgaagaggattttctttccctcccattcaccgataaaaacgatttgcgctccgcctatcctttggggctggccgccgttcccccgcgggaaatcgtgcgcgtacatgcttccagcggcaccaccggcgcgcccgtggtgatcccctatacgaaaaaggacattgccgattgggcggacatgatggcgcgttccctggccatcgcgggcgtcggcccggacgaccgcctgcagatcgccacgggttttggcatgtggacggcaggttccggctttcaaacgggcatcgaacgcctgggcgcaatggccatccccgccgggccgggaaacaccgcgcggcaattgcgctttttgatcgatatggaggcgactgtgctgtgcgccacggcttcttacgcgctgcaattgggcgaagaagcgcaaaagcgcggcctgctggaccaactgcgcctgaaaaaggcgatcatcggcgcagaacattggacgcagaaaaccggtgagcagatcgccaatttgctgggcgtggaaatctacgatatgtacggcctcacggagatctacggccccggcaccggcgtgagttgcgccgaacacgatggcatgcacatgctggatgaaatgctgctatatgaagtgattgatccccacaccctgcggcccgtgcccgatggagaaaccggcgaactggtgatcaccaccctgtttaaggaaggcgcgcccctgctgcgctaccgcacgcacgaccttacgcgcgtggtgcccggcgagtgcccctgcggcttgcgctatccgcggctggagcgcatcctgggccgcacggacgatatggtgaaataccacggagtaaacattttccccggccaaatcgacgagttgctgcgcggcgtggaaggggcgaacggcgaataccagctgcacctgcgccacgaaaaccagcgcgatagcgcgctattgcgcctggaatccattagcgacccaggcgacatctccgcccgcttccgctcgctcatcggcgtgagcatcgatgtggaagtggtgccccttggttcgctgccgcgcagtgaaaagaaaacccgccgcattttcgacttccgcggcagatgactgcgttcgcgcggacgagagaggcttggttgggatgccacagattgggatttgcccggcgtcctttttcagtggtcgcgccgcaaaaaaatttgttccgcggcgtttacaatttccgccgggtattgtataatggaaaaaaacgactgtgaggtgctcaaaatgtaccattttcccattggcgtaattctcgattctttccgcaaacccgtgccggaagcgttggcgctggcccaaagcatgggcgtgcagggcatccaggtgtattccacctatggcgatctttcgcccaaaaagctggtaggcgcgaagcgcaaggaattcctggatctggtgaaatcgcacggcctggtgatctccgcgctgtgcggcgatctcggccacggctttggcaacgcggaaaagaacccgcaactgatcgaggattccaagcgcattcttgatttggccaaggagctggaaaccgacgtggtgacgacgcacatcggcgtggtgcccgccgaccccaaccatccgcgctacaagatcatgcaggacgcgtgcggcgcgttggctgaatacgccgatagcatgcaggcgcatttcgccatcgaaaccggcccggaaaccagcctcacgctgaagggcttcctggattcgctgcattccaccggcgtggccgtgaacctcgatcccgccaacctggtgatggtcacgggagacgacccggtgaaagccgtccacaacttgaaggactacatcgtccacacgcacgcgaaggacggccgcaaactgctggagcgcgatccggaaatcatctatggcctgcgcacggacgattccgtggtggaagacgccgctttcatcgaactgccgctgggcacgggcgatgtggacttccccgcctggatgcgcgcgctggaggaaatcggctatcgcggattcctgaccatcgagcgcgaagtgggcgacaatcccgcgggcgacatccgcaccgccgtggatttcctgaagaacatcatcggctaagggggaacgttcatgccctgtgccgtgatcaccggcgcttcttccgggctggggcaggaatacgcgcgctatatcgcgcgtacgcacccggaaattgaccggttctatttcatcgcccggcgggaagagcggctggaggcgctcaagcgcgaactgcaccgcgacgccgtgatcctgcctttggatttgacccaagacgagagctacgcggccatttccgcgcagttccgcaaggacaagccggaaatccgcctgctcatctgcaacgcgggctatggcaaatatggcgcgttcgccagcatcccgctggaagaacaatatggcatggtcgatttgaattgccgtgcgctcaccgcggtcacgcagatcgccctgccctatatgcaaaagggcggcgcgattgtggaggtgtgctccatcgcggcctttgtgcccacgcccaacatgagcgtgtatagctccacaaaggcctacgtctttagcctctccaaagcgctgcgctgcgaactgaagtcccgtggcgtcaacgtgctggccgtttgcccttgccccatggatacggaatttctctccatcgcgggcatcgctgagaaaaagacctcgttcaatcacctgccccgcatccagcccgaattggtcgtgcgcaaatccgtggagcgcgcgctgaaaggcaaggcggtgtacaccggcaaggtgctctataaggtctatcgcgtgctggccaagcttctgccgcacaactggctgatgaagctaaccaccatataaattttgctcgcccgcaagccaaccggtttgcgggcggctcattgcgaagaaactgtttggcgacggcaaaggctgcgcatcagccacgcgagagcgccttttttttgtccattttgccaaccagcggcgctcccaagcgcgccgcgcaaattcacaacatagccgcatacctcatcgcgttttgcgcatactgagagcgatgcgccatcccattttgcggagcgcaaagaggcttgcgaggtgaatgcggtgagcgaaatggaacgggaaaaatccgtatccccggttctggaagaaaatatagcggccatgcgcgccatgttgcacgcggacaaaaacaaggattttgtcgcgcgtgagtttgtgtgcctggaagcgcccgcctgcgccatgttcatagaaggcatggccgggggcgattttttggacgattatatcttgcgcccgctcatggagcaccgccccgccagccgggtttcgcctagcaagcgcgccggctatctcctgaaagccgccgtgcccatcaaccagggaaagctctcccagtctttggacgagctggtcaaagaattgctaagcggccaaacggccatcttcctggaaggatgcggcgaggccatcctgctcgattcccgcaaatatgagatgcgccccgtgatgaatccccgcacagaggccgtggtgatcggctcgcaggagggctttgtggaaaacctgcgcaccaatctcaccctggtgcggcgctatttgcgttccccggaattgatcaccgaattcatggatgtgggcacaaaaatttccacgcgctgcgccatggtgtatctcgacggcgtggcgaacgaaaccgtcgtaaaccgcgtgcgcgaaaagatcgccgccatcggcgaagcgcacgtgctcaattgcggcagcctcgcgcaactgctggagccgcggccttttttgatttttccgcaaattttgcaaaccgaacggccagacaggacggtggccgcgctcacgggcggacaaatcgctctcctgatggacaacgcgccctacgcgctgatcttgcccgtgaccctgtttgatttgatccacgcatcggacgattccttcatgcgctggcaatacggcacatttttgcgcatcatacgcctgctgggcatcctcgtggcgctctatctgcccgccatgtacatcgccgtatccaccaaccattcgcatatgatcccgctcaagctattgacctccattgccgaaacccgcgtggacgtacctttttccgtgctggcggaagtgctgtttatggagttcgcgttctttttgatcaacgaggcaggcacgcgtatcccttcgcaaatcggttccgcgctcggcattgtgggcgcgctaatcctggggcaggccgccgtatcggcttccctcatcagccccattttgatcatcatcgtggcgctcaccggcctggggaactacgtggtgcccaattactccatgggcgtgggcatcgaaattctgcgcctgctgttcatcgccgccgccgccattatggggctgtatggcatccttctcgcctcttttgtgctatttggccggctgggcgcggtggattgctttggcattcccttcctcgcacccgtcgcgccttggcggccgcacaatccggatatcatcgcccgcttgcccatttggctgcaacgacggctgaatttctatgccgagggcggcagttggctgaaaaaggagcaaaaatgaaccggttatcctatcgcagcgcggccacgctgggcatcgtttgcctgggcgtgcgcgcgttcttcgccgcgtacatcgattcccctgagctgctgggcgcgggctggctgggcgttttggcgggcggcgcgttttccctgcccaccctggcagccctgtacgccatcgcgcgcctatatccgcacgcggagccggaagaagccctcgccgcctgcatgggcccggcagccgccaaaattgcgctggcgctactagcgctgaacatgctctatgaaaccgccgcggtggcgcgcatgctgatggcctcttccatatacgaagagcatcggctcaccgcccctttttgggcagtgctgcccgcgctgatcgccgccgcgctggtagtgctcgccggagcaaacggcgtaggcggcgcggcgggcgtattcctgcgctttgccccgctgctaatcgcgctgatcctcggcgtacatttggacgattaccaacccgcgcggctggcgcctgtgctgggcataggttggcccgccatcctgcagggcggcggaaaagtcgcgggtgcgctagcgcccattgccgcgctttggctggtgcaatccggcaagcagactgggtatgcccggcgcgagcggcgcgccaaaccgtggctcatgcccgccatttgcagcgccgccgtattgatcgccgccctttgggccgcgttggccctcatgctagaagccaatgtgttttctgtgccccagagccgcgtcttccgcctgcgccttttgctcgccaacggttcgtcgcccacctatctgcagctgccctatgtagcgctgtggtatggcgcgctcttgtgcgcgcaaggattttcgctgttcgccgccgcacgccttttgcaggcggccgtgcccccatgcccattttcgctcgccacagggctttgcacgttcgcgacggcactcatcgccgggttccgcctggccgaacaacccatcgtgcagatgctcgcaccctggcaagcggcgggcaccggcgtcattttgctgctcgccgcggccatcggcggcatccgcaaaggaggatcgtccccatgcgcgccccaaacttcccccaagtagcattcaagcgcggcaatggacgcgcctgccgggctttggcgtgcctgccgaagcttatagcattcgcgctgctgcccgcggcgctgctgttttcgctgagcggttgcgccccctcgcaccagccggaacaccgcgcctacgtcatctccatgggcgtggacaccaacgacaacagcgattgcgtggtgagcatccaaattccttccatcaccggctcgtccggcagcgcggacggggaaagcggcatggattcctatgtggtttccaccgccacagcgcacacctttttggaggccctagtgcttctgcaagccactacgccccgggagctggattaccggcaaatggtttccttcgtggcctcgcaaaggatcgcctcctccccggtttttcccgaaatcctcaccgaattgatgcacacctatgaaatctatcacgcgccgcaattgatcgtttgcgccggggaagcggcagcctttctggaatcgcagcggccggagatcggcacacggctaagctccagcgtgagcgccatgctggacaactatcagcgccagggctacattccacttgccgaactttccagagtatactatctttcacaatcgatataccacgatcctgtggcgatctacgcggccacgccggatcaggagcactaccgcaatgttgcgccagacaacgtaggcgaaagctatcctggttccttgccacacacaggcttggcgcggaacgaatatatgggagccgcccttttaaaaaacggtgtgatggtgggcacgctcgatggcgcacaaacccagatcttgaacctgctcacaggtacgacggatgaaatggtttattttgcggaggaaaaaaacatactgctggaacgtgcgggcctccatatgggcgtggacattgcgcaggatggcgccgttaccctgcacgttgatatccgcctaaccgtaaagccactgaccagtgcgcccgatccacagaaagtgcgcgaaaaatttttcagcgacctaaccggattgatcaccacttgccaatccctgcaaacggatccctttggctttgccctgctcgccgccagccagtttgccactgtgcccgagtggagcgcgttccgctggcctgaacgctttgcacaagccgctctcgccctggacgtgcatatcacaatgtaggcccgccgtccgccccaatgagaacgcaaaaattgttgcgccggacttgacagaaaccgcctcgaacgtttatactaaacatcatgtaaagaacccaacaaatacgggcacaatgggcggagatgagcaagcatgctaactctggtggtaaaccccatcgcgggaaacgggctggcgcagcgcacgcatgagcgggtgcgcgcgcttttggaaagccgcggcatcgaataccgctcttttgtgacccaggcgcccggcgatgccgaagcgctgtgccggaatctcgcgcgggacggggcggaagccgtcgccgtgctgggcggggacggcacgctcaacgaagtggtcaatggcctggcgctaagcgatgtcacctgtttactcgtgccctgcggcacggggaacgacttcgccaaggccatgcgtttgccgaaagaacccctcgcggcactggaggcgcagctcagcgcggccccggggcgcattgacttgggacgcatgaacgaccgcgttttcgccaacgtttccggcatcggcttcgatgtggaagtgctgcggcaaacggttcgctttaagcgcctggggcgcggaatcctgccctatctgtgcggcgtgatcgccgcgctgtttcgcttttcccctctgcgcgcgcgcgtttcctttgacgggggcctggaaaccgatatgcgcctaaccattctctccatcggcaacgggcaatacatcggcggcggcatgaaagccgtgcccgacgctataatcgacgatggcttgctggacgccatcgccgtggacggcatcgacagccgcttgaaaatcgccacgcttttgcctcgctttatttccggcacccatgcgcgcttgcccctggcgcacgtcacgcgctgcaaagctctcaccatccattgccccggcatgacggtgaacctggatggcgaactgatcccctgcgatgtggccaaatttgttttactggaaaacgccctccgcgtgcgaaaatgcgcgcaaaatgcataaatttccaaaatccaaggggctgtgaaagaacttttgttgttctttcacagcccccatctcggtatttccgccctatcttagcgctgcacgcggccgctggcgttgccgccagccaaagcgagcacttcttccacgctcacatggttgaaatccagttcaatggactgcttcaggcacgaagcggccacagcaaactcgatgctcgcctgcgggtcgaggtctttcaggctcgcgtagatcaaaccgccgccaaagctatcgcccccgcccacgcggtcgacgatgtgaatgcggtactgccgggagaaatacgcttgcccattttcgtacagcatgcctgcccaatcgttttcgctggcggaaatgctaccgcgcagcgtgatggccacgcgctttgcgccaaaccgctcggaaagctgacgcgccacggaaatgtacccttcgcggttgatcacgcccgcgttcacgtccgtaccttcggcgcggatgccgaacacgtccgccgcatcctcttcgttggcgatgatcacatccacatagggcatgagttgcgccatgacctcgccagcgcgctcgcgcgaccacagctttttgcggtagttgagatcgcagctcacgcggatgccgcgcgcgcgggccattttcagcgcgtccaggcaaatttcgggcagctcgccgcccagcgcgggggtgatgcccgtgaagtggaaccaatccgcgccttccaaaatcttgctccaatcgaaatcttcccgcttcgccagggcgatggacgaaccggcgcggtcgtaaactactttagaaccgcgctgcgaagcgcccttttcgcaaaaatagatgcccagccgcggaccgccgcgcacgatgctctccgtatccacgccaaagcggcgcagctcgttcaccgcgcactggccgatctcgtgcgcgggcactttggtgacatagctggcggggatgccataattcgccagcgaaaccgccacattcgcctcgccgcccgcgtagctggcctcaaaggcgctcgcctgcacaaagcgcttgtatccttccgggttgagccgcatcatgatttccccaaagcacactaccttacccatgcaaaattccctccatttttttgaattcccctcttgccgattgcgctaaaatcttctataataatatcacacacaggaagcttttgcaatatagaaagaagggatttaccatgatgaatttgccggagatccagctgggtattgtggccgtgagccgcgattgctttcccatcgatttgagccagcgccgccgccgggctgttgtggccgcgtatcgcgcgctcggccaggaaatcactgagatcgagacgaccatcgaaaacgaaaacgataccatgaaagcgctggccgagctgcaaagcgccggcgtgaacgcgctcgtggtgttcctgggcaattttggcccggagggcccggaaaccctgctggccgaaaagttcggcggccctgtgatgttcgtcgcggcggcggaggaaaacatccccgtgctttccagcgaccgcggcgacgcctattgcggcatgctcaacgcgagctacaatctcaagctgcgcggcgtgaacgcctacattcccgaatacccggtgggcgacgcgcaggccgtagccaagatgatcgcggaattcgtgcccgtcgcgcgcgcgtatattggcgtgaaaaacctcaaaatcatcacctttggcccccggccttacgacttcctggcctgcaacgcgcccatcgcgccgctgttcaccctgggcgtgaacgtgcaggaaaattccgagttggacctgctcgccgcctacaaggcgcacgcgaacgatccgcgcatccctgacgtgatcgccgatatggaaaaagaactgggcgatggcaacaaaatgcctggcatcctgccaaagctcgcgcagtatgaaatcacgctgctggattggatcgaggccaaccgtggcgcggcgcaatacgtggccatggcgaacaagtgctggcctgccttccagacggagttcggctttgtgccctgctatgtgaacagccgcctcaccgcgcgcggcatcccggtggcctgcgaagtggacatctatggcgcgctcagcgaattcatcggcacctgcatcaccggcgaaagcgttactttgctcgacatcaacaacaccgtacccgccgatatgtacgcggcgagcatcgcgggcaaattcccctaccggcacgacgaaaccttcatgggcttccactgcggcaacacgcccatctgccgcctaaagaagggcaccatgaaataccagttgatcatgaaccgcggcctagaaaatggcggcgagccggacatcacgcgcggtacgctggaaggcgacattgtccctggcggcatcaccttcttccgcctgcagggcaacaaggatagcgtgctcacttcctatgtggcgcagggcgaggtgctgcccgtggatacgcaatccttcggcggcatcggcgtatttgccatcccggaaatgaaccgcttctaccgccatgtgctcatcgcgggcggctatccgcaccacggcgcggtggccttcggccatgtgggcaaggcgatcttctctaccctcaagctgctgggcgtgaacaccgtcagcttcaaccagcccaagggtatgctctatcccacggaaaatccgttcgcctaagccgtttttcaacaaaaaaataaaatgcaaggggctgtgaaaaaacaacaaaggttttttcacagccccctatgcatagcattttttacttcacggtgatgcggccctggggctgcgcgtattcctcgccgaccacgccgccgagcacttcggtggtgtagttgatcagcgcgtcttccagcgaaacgccggtatcgatgccggaattcgcatagggatacgcgaaagcgtaataggtgtcgccacccgcggcggtaaagtcattgctggcgatggtgtacagcgcctcgggatcaaaggcctcgccgcccacgctctcgatggtcacgcggctgccggggttggcgggtgcgtaataggtggaattcggatacatttcgccattcacatattccacgctggtgtccaccgtgaacacgatgcccgccacctgcgggaacgcgccggacgaagcgggcaggaacgccgtggcagcttcaatcgcctcgagcagttccgcgccggtcacagtgaaggtcaccaccatgttgccataggggaacacagtcttcatgtcattcatgctgatgtcgcccgccgggatgctggcgcggatgccgccgccattggtcacggccgcgaccacctgatcgcccacggactgctgcgcctgccagaggatcgcgtcgctggcaaaatcgcccagattggtttcctcggtgcgcacgccgggttcacgctcgccattgagatccacttcagtgctggcgaacacggcggaaagctgctcctgtacttcggcgtccacgccgttgaccagcgcggccacggtttcatcgctgcccgcgtattccgcggcggggatcaagcggcccgagaaggtctcaccgtcgtattccacgacgcccacgttctcgccatactgacccgtgctctccagcagagtgtcgcccaccatctcagaaatttccgtgtggctgtgtccatcgaggaacacgtcgatgcccgtcaccttttcgagcaaatcggtggagcgattgggcgcgctctcttcatcgacgcccaagtggcccaggcacacgatcacgtcgcaaccggcttcggtcagcgcatccacttgttcctgcgcgcaggcgtacagttcctcctgctggaagaaggtaatgcccttcaccttgtcgggatgcgctttggtcatggtttcgggggtgtccaggccgaacacgccgacctgcatgccgttttccatctcgaagatggcgttggccgtgaaaaccgtttcaccgcttacgctatccacgatgttcgccgccaggatggggaactgcgcctcttcggcaatctgctggagattggccagcccccaatcgaactcgtggttgccgggggacatcgcgtcgtaccccgcagcgttcatgaattcgatcgcctgcgcgcccatgctgaggttcacaatgggcatgccctgcgccgcgtcgcccacgtcgaacagcagcacggaagcgcccgcttcctcatagtcctttttgagctgcgcgattgccgcatagccccaaatgccagtcacttcgttttccgcgtcttccgccacggccaccgcgcggccatggatgtcgttcgtatggatgatcacaagcttgccttccaggctctcttcttcggccatggccggaaccgccatggtcagcgccattgccagcacgagaatccagctcagccatctcttttttagcatactagtttcctcccgtcttttgccggaaccagcgcggtcccttcgaccttattctagcaaaaacccttgctttcgtcaagcacaaaatatatgatacaaatcaaattcaggttgaatccagcgaataccggttgtttccaacggacttttcgtgtataatagaggaaacaaaaccttgggacagagggagcattgccatgagtgccaaacgctatccgccagaaaactttatcggccgcgaattgagctggctggaattcaaccagcgcgtaatcgacgaagccgttacccttgctaaccccgtttttgaacggatgaaattcctcgccatcgcgggctctaacctcgatgaattctttatgatccgcgtcgcttccatctgggatcagatcgacgcgggctacaccggcacagacgcggcaggcatgagcccgcaggagcagattgccgccatcaccgcgcgcgtgcgcgtgatgatgcgcaccatgtacgatgtgttgcgcaaacaaatcttgcccgaactggcggaaaccggcgtgcgcctcatcgataaggatcaccttaccggcgtgcaggccgcctatttggatgcgtattttgaggcgaacatctatcccgtgctcacgcccatggccgtggacgcgacccgtcccttcccgctgatttacaaccgctcgctcaacttgggccttctgctggaaagcgaggacgacgacgcgcctaccttcgccacggtgcaggtaccctcgggcctcgaccgcttgattcgcctgccctcgggggacgatattgtctttatcccgctggaagaagccatcacgcgggacattcacaagctcttcgtgggccagcgggtgctgtgctgccacccctaccgcatcacgcgcaacgccgacctttccatcgacgaggacgacgctgtggatttgctgctcgaaatcgaaaagcagctcaaacagcgccgctggggttccgccgtgcgcctggaaatcgaccaccgcgccgacccgcgcttggtgaaggtgctggaagacgcgctggaattggaagcgggcgacgcgtatcccatcaacgggcccatcaacctcgattttcttaccaagcagatctattccctgccagggttcgaggcttgcaagtatccgccctaccgtccccgcttgctggcgctggaggatggcgaaactttgttcgatcgcattcgccataccgacgtgatgctctaccacccctacgatagtttcgatcccatcgtacacttcattcgcctggccgcgcacgataagcaggtgctggccatcaaacaaacgctgtatcgcgtgagcggcgattcccccatcgtgcaggcgctgatggaggccgcggacgcgggcaagcaagtgacggtgctgctggaactgaaggcgcggttcgacgaggagaacaacatccactggggccgccgcttggagcgcgtgggcgcgcatgtcatctatggcatgcccaaattgaaaacgcactccaaaatcgcgctggtggtgcgcaaggaagaggacggcatccgccgctatttgcacctgggcaccggcaattacaacgatgtcaccgccaagatctacacggatcacggctttttgaccaccgatcccaccctgtgcgacgacgcttccgccttcttcaacatgctcacgggcctttcccacccgcccaagctgaagaagctgatctttgcgccgaaccacctgcgcaaggaactgttgcagcgcatcgaccgcgaagcggaaaacgcccgtgccgggcgcaaggccgaaattctggccaagatgaactccctggtggacgaagaagtgatcgagcatctgtacgacgcttcccgcgccggcgtgaccattcacctaatggtgcgcggcatctgctgcctgcggcccggcattcgcgatgtgagcgaaaacatccaggtgcgttccatcgtggggcgctatctggagcacagccgcatcttctgcttctatgccgacgggcgacgcgaagcctacctttctagcgccgactggatgccccgcaacctcgaccggcgcgtggaactgatgttccccatcgaaaagcccgccctgcgcgaccggctgtatgacctgatggcgctgcaatggagcgacaaccagaagagctgcgagctcacggaaagcggcacctacgagcgccgcgcgcccgccgatggggaagccgccgtgaattcccaggaagcttgcatggctgcgccttcgcggcaaggccgctaaaacgtcaatatcacaaaatccggaaggaagtgcccgtttcatgcccattatgcaccgcgacgattcctttgccactatgctgctcacctgcgcgctttcgccagaccgcgaagagctggtgcatccgctgtgcgcaacggaattccacgagttgcgcctactggccgcccgcgcaggcgcgccgctcggccagctaatcggcatggacatgagcggcgtgatgcgcctcttggaagtggacgaaatgaccgcttaccgcctgtgcattctgctggggcgcattttgcccctttcctatatgctggaaagcttggccgaaaagggcgtggatatggtggcgtattgcgacgcggaataccccgcgcacgtcaagcgcgcgctgcctgatagtgcgccgccggtgatctattcctgcggggatctttcgctgctggagcaaaaggccgtggccatcgtgggggtgagcggcgtgaagctggcgcaatcgctgcgccagtccatccgcgatttcacgcgcacggcggtggaagagggctatgccatcgtcacgggcggcgagctgggcgtgatgcgcgtggccgaagaggccacggcggaggccgggggcacgcaaatttgcgccgtggcgggcgatatgctcaaaaaagcatacgacgaagcgttcgccgcgcaaatcgccaaccaccgcgcgctctgcctttcgctggcgcatccgcaatcgctgttcacggtgagccacgccgccgcgcgcatgcgctttctattcgcgctttcggacgcggtcttcctgctcaataccgacctcaagcgcggcgaaaccgacgcgctgcgcgccaagtgctgcaaatgggtgtacgcgctggcgccggacgcgcgcgccagcacaaacgcctttgtggcgcgcggagcagcggccatcaaaaatttgcgggatttcgatttccccacggcggcgaaaaattgggcgctctccaaaggcgtgcagctgagcatcttcgattatctggaagaaccgcccaccgcgccgtaggatatttcttcccatgatataagcgaaaaggcgaggcggggaactctttgggttcctcgcctctgatcgttgataaacctttggtttgtcaacgagggattacccggccgcttgcaaatcaaagatttgcggccagccaaccgccatagtccattactttccttccgggcagcgccaatcgaaggcaggcgcgggcgcgtcgaagggcacgttcatgaatttgtcgctcagcggcgcgccctggatgcggttcaacatcagattttgcaacatgctgaaatcctccatggtttgcgcgtgataaccctcgcgccaataccacagcaggttttcctccacgcccaggaagcgatagacctcgcgcgcggcgatgttgctctggtacgcgcccagcggattggcccaaatatcgctcttggcctcagaatcaaacagcacacgcggcgcgaccagcgctttcagctcatgctcatcaaacggcaactgcgccgctcgccccgcgtaggcgggtagatccggccccatccaatccgggaacgcgcgcacgatatcgtccaattcttcactgcgcgcctcattcccgtcctcggtgatcgcgcgcatggcgatgcgatagcaactgccgcccgcgcagggcgcttcggggttgacgatggtggcgcgctcgtccagcgcgcccgcgaccaaggcggttttgcccccgcgcgaaaggccggtgaaggcgatgcatttttcgtccaccaggcccagttgcagcagcgcgtccacacagcggctatagccccaggcccacgcgccgatggcgcggaacgtgtattccggataagcgcggtaaatcgggctattgcgcgcaatgccgcgcatatccggcacgatttcgcagcggttgaacttggcgacgagaatcccctgctgggtaaacaggttggtaaccgccagatcgttcatgatgggatagcactggtcgccgtccaccaacgtggggcagggctgctccgtgttggggcggtgcaccgtcatcgtaaagctaaaggggcatgcgcgcgtgcccgtgtggatgcggaaggtttcgatgcggccagggccggaacggttcagcggttccacttccacaaattccggttgtggcggcatggtgccatattgcagttccaccgccgtggcgatcagttcctgcctgcggcgccgccaatcctcgcgcgtgcgcaccggcgtgccatcctggaacacgaagggatctggcagcttgcccagttcgcggtattctgtcacttgcaactttttgagctccgccacttcattctcctcctaatgcgaaaaataccgtattttgatgccgcggtacgcgtccttgcgaaagaactcatacacgctgcaaaccttatccgccagcaccacgagccatccttcccgataccggggcggcacgggcgtgagtggaaacatgtgcttgcggataatatcgcactccacttccgaaagctcgaacacccgccgcgcgttttccagcgctgcgctggggtggaaaaacgcgtgctttttgcgcaaaggatcgcgcacgtgccaatcgtacagaaaataatcgtgcaacagcgcgccacgcgagagcgcctcttcccgcacgcgcagatgcaaggcgcgcgcgatggcaaagctcacatgcgctaccgccacgcagtgcaacaggcacgatgtgttgccgtgttgcacaaattgctccatgcgccgcacctctggtcgggtggcaaacgaacgaatataggcttcctgccgtgcgcgctccatatagttcctccattccctgtgaaagcgcctacagtataccacattcttcgtcccgcggcaagcaatatgcgccattttgcgattgacaaatttccggtattttggtatagtattgcccggcggctgaagccgccggccagacatttgccacgaaggctttcgcgcatgaagcgcggacactgggcatctttttgtctggaggaatttgtatgcatcgtaaccaaatccgccgccttacgctcaccgccatgtttatcgccctgggctatctgctgccgtttttgacggggcagattccccaatttggcaccatgctcagccccatgcacatccccgcgctgctgtgcggtttcgtttgcggctggcaatatggcctggtggccggggcgatcatgccgcttttgcgcagcgccacactgggcatgccgcccatgtttcccaccgctgtggccatggccttcgaactggcggcgtatggctgcgccgcggggcttttgtaccgcgcgctgcccaagcacatcgcctttgtgtatgtgaccctggtgctgtccatgctgattgggcgcgccgtgtggggcctggccagcgccgttttgatgatgggcacggagaacgttttcaccacgcaggcttttctggcgggcgcgttcatcaacgcctggccgggtatcgtcctgcacatcctggtcatcccgcccgttgtgctgggattgcgccgcgcaaagctaatggactgaggaaaacaatggagcaacgatacgcatgaacgcactcaacgccttacgcatccatatgcggcgctatccgcagagcgagccgcaggactggatcaagctcttgtaccaaagcgaatttgggcccggccattttgtggaagcgggcagggttctcgcgcgcctaaaaagcgagatggccgcgctcgcgccgcgggaggatctgcccctgtttgagcccattggcaacggctacgcccggctgcaccttgcggcggcgaaaaaagcgggcttgcgcccggaaaccatctgcggcctgtttggctacgcggccaaccacgcgcatggcgatgcggaggctttcctggagcgcttggatgcgttgctcgccttggccgaagccggtaggcgcgaggagctgcagacctggatcgccgcttacaaggcccagggctgcccgcctacgcaccacagcgcccgctacgcggccgcctaccagccggcgtaccggctggttccgcaagccgccgcgcagttcgcggaggtgttcctgcgcatcgacgcgctgctcgcccgccagccccatgtgattgtatcggtcgacggcaactgcgcttccggcaagagcacgctttccgccctactggcggaagtgtatgccgcgcgcctgatccgcgttgacgacttctttgtgccgcccgagcaaaaaacgcccgagcgcatggcgacgccgggcggaaatgtcgattacgagcggttctggacggcgattggcgcgcatctgcacgacgaggctcccttcgcctatcgcccgtacaactgcttcaccggcgcgctcgacgcgcccgtcaccgtgctgcccaaccgcctgaccatcgtggacggcgtctatggccagcaccccaccctgcgccatttgtacgatctgaagatcgtgctctccatcgatcccgcgcgccagagcgcgcgcctgcttaagcgcaatggcgaagcgctgcacaagcgtttcatcgcggagtggatcccgctggaagaattgtacctcaccggcacgcacgcgcgcgagcgcgccgacctggtttatagcgtataacctttttcacctcggcgcgcttgacagcgcgccggtttcgtggtatggtaaaaaccgcaatccattacaggcagagtaggattccgcgcgttgcgcgcgttgcgcgctggagtgctttccggacggggagttgccggggagacgaagagcttttcgctcgcggtgcggagttcgcatcccgctgccgcatgaagaggcttttgaaggatacttcaggctcctgctatgcggccgcgccgcagggcaggcgcttttttgtgtgccgttcctgcggcaaatcgcgttatcgcagaaaggacggcccaaccctatgccccaatcttccctatccattcgccgcatcgcggtgagcgcgctgctgatgagcgtggcgctggtgctcaacacatttttcaccatctatctgcccctgttcggcgaaaacggcgtgagcgtgggcatatccggcattttctccatgctgcccagcgtgctgttcggcccgggatacggggcggcagtctccggtctgaatgatttgctgggctatttgatcaagcccatgggcgcgttcatgccgctcatcacattcaccgccgcgctgggcggcgcgctgcgcggatggctctatttcgccttccgcaaggcccggcccgctcgggtgcgcgcggccatcatcgcgctttccgcgctgctgctcctcgccgggctatacgccctgtattgtttccgcgcggacggcctcgcgaacctgttcacgggagaggaaaccgcggatcccgcgcaaatgcacgcgctcagccgcgtcttggccgagcgcgccgccggaaccaaggatcctgccggcaacctggcaacctaccgcacgcttatcaccggcggcctgttcctgtgcgccgcgctggggctgtgcctactgatggcggacgccatcgccagcaagcgcgcggcggacgcgcaagcgcaaaccggtacgcttgcgctcacgctcgcagtgctgctctccggcgtgatcgtcaccacgctcaacacggtaatcctgcgcgaaacggtttacgcttcctggaaggtgtttcccttcatcgccatttggctgccgcgcctgttggaagaaatcctggtgggcacagtgaaggcttgcctaatgcttcccctgctggccactttccaccgccagagcgcgctgcgccgcatcgcgcgctaaaagagtcccatccagaaaaatctgcgccgccggcccgccaaaatcgccaacccttccctacggctttgccttgggcttgaaaattagcgcgttgagcaagccgaacaaaatggccgtcgccacgccggcggcggtgttttgaatgccgccggtgaacgcgccaaagaacccatatttgtgcacggcttccatcgcgcccatggccagtgaatagccaaaacccgtgagcggcacggtcgcgcccgcgcccgcgaaatccacaagcggcttatacacgcccagcgcggtgagcaccacgcccgccaccacgaacagtaccagaatgcgcgcgctggtgagccccgtgtgcatgaggagcgcctgccccacgcagcagatcagcccgcctacgacgaaggcctttacaaacatccacaccgtttccatctatttcccctccagcgtcgcggcgaaggcgatcccgggaatggatt

SEQ ID NO: 4564 - DNA, 7191 bp, Unknown
  16S sequences of unknown bacteria
caggctaggcccgtttttgcagggcgtgttggagtttgtccgcgcatataaaacgctgtcctaatgaaaagggatatccaatgcgcggccacgtcctttctccgcgtggagaaaggacgcaaagagacgccgggggctttgcccccaggcccccggagaatttgccgattttctcttcataaaaatcggcgggtacggcatctcctgaaccgacgttcatacaacaagggggcccggggcccccgggagtctggggggcatcattttataaaattataaccgtacataggactttctgtataaaagaagagctccggtgtgatgaagttccaaggcgcccattggatgccaggggcttatgatttgaagcggcacgagcagcgggggatcttgcgggatggccgaaaccgtgctacactgaatccaaaggttcaggcagccgggatgtgggccgggccgccagacgaaaggaagtggaagggacatgaccgacgagggccgtccgtcatatctaaaggatgtgattgttttcatcccgtcgctgaatccggacgataaactgctctcgaccgtccgcagccttcgggaggagggctttacacggatcctggtgctggacgatggaagccgtgaagaaacggctcccgtttttgcccgggtgaagagcgaatgcggctgcgaattgctgcggcatcccattaatttgggaaaggggcgggcactcaaaaccgctttcatgtatattctgaacacctatcccgcctgtgccggcgtcgtgaccgtggacgccgacgggcagcacaaagcaaaggatgtggcggcttgtgccagggcgctcctggatcacccggacagcctgatcctgggatgccgcgattttaacgagagcggagtgcccgcccgcagccggtttggaaaccggttgacccgccgggtgttcagttttctctgcgggctgaaggtctcagatacccagaccggcctgcgtggaatgtcgaagcggctgatggaggcttttctgccggtcaagggggagcggttcgaatatgaaatgaacatgctcatcgaagcggatgagcggcagatcccgatccgggaggtgccgatcgaaaccgtgtacatcgaggaaaaccgctcttctcatttcaatcccctgctcgattccgttcgggtttattcggttttcacccggtttatcctgtcttcgctgacctcttttttgttggatatcctgctgtttgcgctgttcgtctatctgctggaggaccgcgctccgcagctctatatcttttatgcgacgctgggagcacggctggtttcctctttgtttaatttcctgaccaacaaaaaccaggtttttcagtacaaggaacgcagtgtcccggcgctcacccggtattacgccatctgcctcgtggtgctggccggttcggcctttggcgtctactttctccatagttggttcaaaatcagcgaggtggcgctgaaaatccccgtggatctgctgctcttcgtcctcagctttcaggtggagcggaactgggtgttcggccaaaaggacaaaaagggcattcaacagtcttcgcgtcggtgaaacgccgccgccaatcggaaaacggcggtggagggcagaatttaaaaggcggttggaaccggaagttgtgcttgacccatgacgggaaggatggtaaaataaaaaggtattttttgtcgggtggatttcctgaccggcagggacgggaaggcggagctctctttatagggagaaaccgccggacgccgggaggtgccccggaccgggaggccccgtgaggaaggagagaggcggatttgattgccattgtggattatggggcgggcaatctccgcagcgtagagctcgcccttgccaggctgggcgtccatacgcgggtgactgccgatcccgacatgctggcgctggccgacggcctgatcctgcccggtgtcggcgcgttttccgatgccatggcggcgcttggccgcagcggcacgatcccagccgtgctggaagccgtgggtgcgggccggccgctgctggggatctgcctggggatgcagctgctgctcgacggcagcgaggaagggcccggggtgcccgggctggggctgatccccggagaggtccggcgcctgcccagctgcggcctcaaaatcccccatatgggctggaacagcctgaccccggccaagccgagcccgctgtttaaggggctgccggaggagccgtatgtgtatttcgttcattcttacgcctgcaaagccgccgaccccgccgatgtgctcgccgtgacggattacggtgtgccgttccatgcggccgtacagcggggccgtatcctgggcttccagttccacccggaaaaatcgggggatgtagggcagaagctgctggcgaattttgtagagatggtgagggggacggcctgatgtatgccaaacggatcatcccctgcctggatatcaaggacggccgtgtggtcaagggcgtcaatttcgtggatctgcgggatgcgggtgacccggttgaagtggccgccgcctattcccgggagggtgccgacgaggtggtgtttctcgacatcacggccacccatgagggccgcgcgaccgtggtggatttggccgcccgggtggccgagcagctgtccatcccctttacggtgggcggcggtatccggacggtagaggatttccacgacatcctccgccagggggccgataagatcagcatcaactccgccgcgatcgaacggccggggctcatctctgaagcggccgaacgtttcggcagccagtgcgttgttgtcgccatcgacgcccggcgcagggagggcggcggctgggatgtgtacaagcacggaggccgcctgaacaccggcctggacgctctcgagtgggcggtccgggcggaaaagctcggcgcaggtgagatcctgctgaccagcatggactgcgacgggaccaaggcgggctacgatttggagctgaccgccgcggtgtccgaacgggtgggcatccctgtcatcgcttccggcggcgcagggagcatggagcattttgccgaggccctgctgcaggggaaggccgatgccgttttggccgcctccctgttccattatcatgaagtggatatcggcgcgctgaaaacctatctggccgcccggggaatcccgattcgtccagtggtgaaatagaggaggagcaacatggcagcaaaatacgtatttgtcaccggaggcgtggtgtcgggcctcgggaaggggatcaccgccgcgtcgctcggccgcctgctcaaatgcaggggactgagcgtgtcggtcaagaagctcgacccgtatctgaatatcgacccgggtaccatgaacccgatccagcacggggaagtgttcgtcaccgacgacggcgccgagaccgatctggatttggggcattacgagcggtttatcgacgtcagcctctcccagaacagttcggtgacctcgggcaaggtctactggaacgtgctgcagaaggaacggcagggggattacgacggcgggactgtccaagttattccccatatcaccgatgagatcaagcgccgcattgccctggacgcggacaaatacgacgtgcacatcgtggaaatcggcggtacggtcggcgatatcgagggcctacccttcctggaggccatccgccagttcgctgtccagcacggccggcagaattgcctcttcctccatgtcaccctcatgccctatatcgcggcttcgcaggagatgaagaccaagccgacccagcattcggtcaaggagctgctctccctgggcatccagcccgatatcatcgtttgccgtgccgagcagcctatctcccgggaactcaaggacaaggtggccctgttctgcaacgtcccgcgggagaatgtcatcgccaactgcgacgttccgctgttgtatgaggcgcccctcgccctcgaggaggaggggctcgcttccatcgtctgcaagggcttggggctcggcgagccgcccctggatctgaccgagtgggagaagatggtggacaccctccgccatcccgaggtgactgtcaccatcgcgctggtgggcaaatacgtcgagctgcacgatgcgtatctgagtatcgcggaggcgctcaagcacggcggcatcccgagccacgcggccgtggatatccgatggatcgacgcggaaaccctgaccgatcacaatgcgcgggaggtgctggggccggccgacggcatcctggtgccgggcggcttcggcagccgcggcatcgacggcaagatcgccgccgcccgctacgcccgtgaaaacgggatcccgtacctgggcatttgcctgggtatgcagatcgcggtggtggaatttgcccgccacgtgttggggtatacggatgcgcatacgaccgaaatcgacccgacgacgacccacaacgtcatcgatctgatgccggaccagcgggatgtggaccagcggggcggcaccatgcggctggggcagtatccctgtgttctggatatccgctccaaggcatatggcgaatacggcgaggagctcatttacgagcgccaccgccaccgatatgaattcaataacgattaccgggaagagatggaggagaagggaatgctgctcgccggtatatcgccggacaagcatatcgttgaaatgatcgagctgcctgaccatccctggtttgtggcctgccagttccatcctgagttcaaatcccggcccaaccggccccatccgctgttccgcggcttgattgccgcggcggtgaaaaggagacaaggacgataactcacggggcttcttcccgtgagcttccggcgccggatgcggcggccgtcagaagcgggatgaatacatcgtattcatcccgcttctggtatgcggatcttatttgaggtgttggcgaactcgccgcagcggtgcggaagggagataaaaaaccagccgcacaaccgtgcggctggttcctggatccaattaaaggactttgaaggaaccgatgctgtcgatcagggcctgtttcgcggcggcgtctccgttgaaaacggcggtgagcgcatacaaggtgccgtccttgctcagcatggtctgataatattccgcgttgacaccggctacggtcagcttatagttcatcttcaggccggtcagtccgttgacctctacggaatcgaaatccatccattcaaagccttccccccactgctggaaggtttccgcatagatttctttcatgtcatccgcgctccccggagggatggtcccaggggtcactgtgacggagaagctatccaccgtcgtggaataatccccggcgacaaattcgacgatccccgcgatagcgtaggtaactttccaaccgtccggaaccgttatctggtagctggaatcttcgctggtatacacattgtcaacgattttgccggcctgcgcggatggtgcctccgcagcctgcgtggtgggggcagttgtggcagaggtgcccgacgtatccgtcccggaggaagctccgccggatggctgttccccgcagccggttgccgccgccaggagcagtatcatggccgcgctgataccgagcactttcttcatgatgatttttgacccctttctaacttggcttatttccatatatataataaaatgtggacaaagtcaagcaaatgcgataatattcgtctaaatatggggtaaagggataaggaggagcctatgcagacgtttttccatcggtccggacatctggatctggaccggaccatcgttatggggattttgaacgtgacccccgacagcttttccgacggcggacggtatcttttgccggaaaaagctctggaacacgcgcttcagattcaggagcagggggcaggaatcctcgacgtgggggcccagtccacccgccccggacatatccccgtatcgcctgaggaggagaaggagcgtctgctcccggtgctccgtttgctcaaagggccgatacgcattccgatttcggtcgatacctactatccggacgtcgcgcaggccgccctgcttgagggggcctcgatcctcaacgacgtatccggccggctggacaacggcatgatggagctggccgcccggacaggcgcaggtcttatcttgatgcacgcgggagacggcgcggacgacacgggaaccggcgaggatgttctgcaaaccgtccgcgttttttttgagcgggcgctggacagggccgcccgagtgggactcgatccccggcagatctgcctggacccgggtatcgggttcggcaagacccgggagggggaccgccgcctggtctccaatctgaagcggctcacggcgggcctgccggagacggcgctgctcgttggagcctcccggaaacgggtggtaggggaatgcgtcggggagacggttccgctttgtgagcggctgccggggaccctcgcgtttcacagtatcgcgcagtggaacggtgtccgcatcctgcgggcgcatgacgtggctgaagctgtccgggcagcggcggttgtggatgctttgatgaaggaaggagacgggtgacaatggaacatcgggagaaaaaggatttggatcagatccagatccgcggcctgcgggtgtatgcctatcatggcgtgaaggaatccgaaaaggaaaaggggcagccgttcgagctggacatcacgctgtggaccgatatccgccgggctggggcgaccgaccggctggaggatacgatcaattattcccgtgtcgccaggcgtgtgctttctctcatgcaggagcaaaaagacgacctgatcgagcgggtggccgcccgggtggcggaggggattctggcggacttcccggccgagggcgtgacggtttgcctgaaaaaaccacgggcgccgatcgccgccgacttcgcctatgtggcggtggaaatcacccgctggagggaatcatgagggcggccctggggctcgggagcaaccagggggattcccggggatatctccgcgcggcgctggacagcctggacgccttgtgcgggactagggtgacggcggtctcctccctgtaccgaacagctccggtcggctatgcggatcagccggacttttacaacgccgtcgcagaggtggagacatctttgtcgccccgcgccctg

SEQ ID NO: 4565 - DNA, 1859 bp, Unknown
  16S sequences of unknown bacteria
atatatcggcatttaccaacttatgaaaagataatcagaaatttagtaagtttttcgatttaaaaactttttcctcactttgttgacaaaaaccgacgaaaatggtatgttgtatatcggaagtgatttaatggacggcaagagcgtaaaaacaaaggcctttaaggcggccttcccgcacacggtcccaattcttgcaggctttctttttttgggtgcggcctatggaatacttatgcggacaaagggattcagctttgtatatcccatgataatgagcgtgacgattttcggcggaagtcttgaatttgtcaccgtttccatgctgctttcctcttttgcgcctcttgagacgcttatattgaccctgatgatacagtcgcggcaccttttttacgggctggcgatgctggacaaatataaaggtacgggccttaaaaagctttatctcattttcggaatgtgcgacgaaaccttcagtgtcaactgtacggccgacatcccggaaggggtggacaaaggctggttctacttctttgtcaccctgctcaacgagctttattggtttgccggggccactgtcggaggaattttcggcggacttataagctttgagaccaaagggcttgattttgtcatgacggccatgtttgtggtcatctttttggagcaatggtttaaggaaaagcatcatttgagcgcatatatcgggattttttcgtcagttttgtgcctgtttattttcggagccgacggttttatggtaccgaccatgatttgcgtgctcgtctttctcacgcttttcagaaagcccattgaaaggggagggtcggatttatgacgatttttcagcaggttgtgacaatcggcctttgcgccgtcggaaccatgttcacccgttttttgccatttgcggtcttttccggcaaaaagcccacgccgaaatatatcgaatatctcggaaaggcgctgcccggggccgttttcggtatgcttgtgatgtattgtttgagaaatgttaatttcaccgttcaaagctacggaatccccgagctgttgtcggttgccgttacgggggcgctgcacgtttggaagaaaaatatgtttttgtccattgcggcgggaacggccttttacatggttcttgttaattttgttttttaaaaatgacggctctgccgagagctttgtttcaaagcctctttgcggggctttttttgttgacaaagaaaggctttgacagtataatcattatatatgcttttgaatagaggttaaaaaaatggaatggacaggacttaatgaactgcgggaaaaatatctcagcttttttgaaagcaaggggcatttgaggctcccgagcttcccgcttatcccccagaacgacaactctcttttgcttataaattcaggtatggctcccatgaaaaaatacttcacgggggagataaccccgccgagaaaaagggtgaccacctgtcagaaatgtatcagaactcccgacattgagtgcgtcggaaagacggcacgccacggaacatattttgaaatgctgggaaatttctctttcggagattatttcaagcatgaggccacggcgtgggcttgggaatttttcaccaaggtgctggaaattcccgccgataagctttgggtgaccatttatctcgacgacgacgatgcctttgacatttggaccaaggaggttggggtgtctcccgaccgaattgtaaggctcggtaaggaggacaacttctgggagcacggttccggtccctgcggcccctgctcggaaattcattttgacagaggcgagaaatattcctgcggaaagcccacctgcgccgtatcagaacagt

SEQ ID NO: 4566 - DNA, 2201 bp, Unknown
  16S sequences of unknown bacteria
cttggtgatcttctcctctctgggaaagtcggcattaggggacagacggacatacgaggtgagggggctgtttctggcgatgacctccgccgcctcctcctctgtcaggtccttccccacataggggggaagcgcctgctgcgcctgataggccccggccagggtaacggcggccagaacgcagaaggccgccagtagcgccgccatgccatgcggacgcgggcgcgcttttttcgattgtgcttttgtgctcaaatcgtgccatcacctccttaccagaagatctggaccatgttccaggcaaacagcacagcgaagacgctgaacatgcacttcacggcggttccgctcagacggcgttttttcccttcgtcgtctccggcggtcatgatcaaaaacggcacggtcgccatatagaaaaagctggtatccatcaggttgtggacgagggcggcagaaaacgcgccccgctgggccggatcctcccgcttgcggaaatggcggaccacggcgatggccagcatggccatggcgatcagccccagttccacccccacatggacaaacacattgtgaatgtgccaggtgttgaagtatgtatccgcatcctgcaggttcagtctccgccactgatagggcccaactcccagcaggggatccacccccagatatcccagcccgttccggatcatggccaaccgttccgcaaatgtcgccgcagcgtttggccttaaaaaggccaccacgcccgcacccaaagctccggtcaggcagatcaggagctttgcccatttcccgtcggacagttcccgctcaaactggccccgataccatgctccgatcaggatatagccgcacaggatcaggcagagccatggccagttcgtggcgtttccagcaatgtagagaaggatcccgcagccgccggcgaagatcatttccgccaatcgacacagcagggaggaaaagcgttcttttccatagaaatgcatcacaaggacgccgatgcccagcgccccaaatgccccaagggaaagcgtcagcgccagggctgtcagggtaatgaattccaggccccgcaggaaccgctccagcgcgggcccattctcttcccgcaggcagctctgcagggcaaaccacccaagcgccagcatcgcgcccatggcgttgggatttcccatcaggccggacaatctggtcgccgacccggagaatgccgccatcacgaactgcccgataccgatggtggccatcacaccggcccatacagcgcatagacttttgagaagtctccgctcctgactgccaagatatgacatcagaaggtaaatcaccgggaaaaccgactgcgtggaggcatatccatccagcgtgttgccgtaggtgcggtatccggaaagcaggctgatcccgttatagagaatcagcgggaccaggatccacaggtccacctatggcacacaaaaacaggccgacaagagagacaatgataaaatttcccgcgccgataaatgtaaatatgaagaatgcaagaaatagcgtcacagcgatataccgtgactcaccggacgcctgcctttccttttcccggctgcgcaaatcgccgtgctttcttttcaacttcccgctcatggcttctcctgcaaaatgtgagatattctgtggttctgctgattcacgctggggagctgattatttgccgtctcggcaggctccagttcccgcatacaggcgggatcacgtgttctcccagcccacggctagctgctcggtgttcagcatctgctcataagatcgtgccgtcagcaggcggatgtcattctcgattttcgcctgagtggcccggtagagccgctgcaagccccgggggggggtacacttggccgcctccacccgtgcgtcccgacccagggattggatctccgccgtcacctgggtccgctgcagagagcgtccgttccgagacgcgaacaccggtccggaccggatgccatttctggcaatataatccagcagttcccgccgcaggcaaccgggaatcggtctctgctccccgctgaccgacagccaccccatctctacagcctccgctgtcaacaggggcagctctcccacccggatgccggtcagagcgagcacctttaccattaggtagatccgctccctccccaaggtccaggcggtctgcagcagccgcagat

SEQ ID NO: 4567 - DNA, 32759 bp, Unknown
  16S sequences of unknown bacteria
gcgctgtacagcgcgcgtcccggctctcttcggttttttcgcttcagcaaataccggacagatagcgcctgacgccggcggaacgtcagcctcttcaggcggcagtcttatagacggcagatcagaagtgcgtcagccgattatctgcaggtcggcgggcatggagggatcggctcgaaacagcccggcggcatactgcacggtgcacagcagtttgccggaggcggtgcgcacggtgtgcagcaggaatcttctgtaccgcaggtgtcgtcgtcttcttcctcatcgcctttctgcagctgattagggaagagctgcgggaagcttgcgcatacctgagaagcctctgcgctgacttctacgaagcctgtggacagtacacagagctgtaccggcacgacgatcttcttttcgcaggcaacgcagagagcgatgatgagatttgcgcagacttctccgttggaattgatcgtgagatctctgcagtagctgtttgtcgccaggcgggtttcgcagctgacattgcagagctctgtgaatctcggcaggattgccgtattgtgtacggacggcatgcacatttcgaagaaactggtgagaatcagaggagaagccgacggcgcgatcgtgatattagccgaaacagggaatgtgacttctcttccgaaattatccatcaggatcagattgagagtaactgtgacctgaccggagatgtttactttctgtgtgccgaagatcggagtgcccttgccttcctcgtcgcactctgaagtatccgcatagagaatgcgttcggagagtgtgccgtccgggccgacgaccttagcttcgctgccctggtcgcagacgaagctggcgccggaaatggaagtattgcactttaatgtgagatttgcgttgtctctgatatctcccggattgaagtatttggaacagctgattccggatacgccgatgaggcggaagccgttcggaatacaaggtgagaatttctgtccgctgactgttttgagtccctgaagattgagcattaccgcgtcatagattttctgaacgtagatcggctcggaaaccaccttgctgagatccccgtcaaaattacacatgtcgtgagcgttgcagcagccgtcggaacaacagtccgatacgcatccattgtgacaactgttctgagaattactgaagcagccattgaagcaacccatagatttacctcctttaaatgatgaattgaagtattttgatgcattatattcggagaatctgcatattgttacaatttgagcggaaagtcaaatttaaagaataaaatggagataaagggtagaaatttgattttattgtggtataatttcagactgtagggcaggccgccgataaacggcggcgtctgaaaaatatttttatattcaaggaggattttataatgacttgtacaatggatgaaatcgtagcagcagctaaagcgagaggctatagaacaaagtataagattgactctaaaaataactctcagtacggcatcatcacgaaggacggcaacagcctcgagctgcgttacgttgaaccggacagagccggcggcgtaagaacacacgttggcagccttatgaaggacttcccgggcacaacggatgaactcctcgactggtatgaagaacagttagcgaacagaaacagagactgcaaaatcgctgactacgttgaaccgagactcggcgaataaattacggcggtatttgatactgcagaacagagacaccggaaatttgtttccggtgttttttctttttggagcggattcgggcagcctgattttctcttccgtaaggagagaataccgcggcggttatttccgaaatcgtttcaacgtaccttcggagagaaaagagggatctttgcgcagggggttccgttccgaagggcaatgccggtgaagaagaaaataatgcttgatttttccggaggcttgttttatagttatgttagcactcgaaagagatgagtgctaacataacttatcaaaggaaatgcggtttcgtattttgcagatattgaaaatcgacgcaaacctctgaaacattggatgggtcagagcgtgcagacagttgcggtatgcgccgaaaatgattcctctgatttcagcggcaaattaggatttacgctgaaaatcggaaatcgagagaagaatccgccgcgcaaagaagcggatctgtcggcgctgagtcataatgagaggtgcaggaaaatggcaaaaaaacagtttaaggcggaatcaaaaaaactgctggatatgatgatcaattcgatctatacaaataaagaaatctttctgagagaactgatttccaacgccagcgatgcgatcgacaaactctactacgaaggaccggaggggctgtccagagacgacttttatattgctcttgagacagatatggaggagagaactctgtccatcatcgataacggtatcggtatgacaaaagaagagatggaagaaaatctgggaaccatcgcgcacagcggttctttagatttcaaaaagtctctggacgatcaggaatccgaagtggatatcatcggtcagttcggtgtcggtttttattccgcatttatggtagccgacaaggttacggtaatctccagaaagttcggagaagaggagtgctggcagtgggagtccaccggagccgacggctacacgatgctggaaagcgcgatggtcggccacggcacgagaatcattcttcacattaaaaataacacgcaggacgacaacttcgacgattatctcttcgactacaagctccgtttcttagtcaagaaatattccgactacatcagatatccgattcagatggaagtggaaaagagcagacagaaagaaggcggagaagaaaaccagttcgagacatacaaagatattgaaacgctcaacagcatggtccctctgtggaagaagagcaagagtgaaatctccgatgaagagtacacgcgcttttatcaggagaaattctacggacaggacaaaccgctgagaacgattcattacagcgtggaaggtctgtcttctttcaatgctcttctgtttattccggagagaccgccgttcaactatttttccgcagattatgagaagggacttcagctgtactccagcggcgttctcatcatggacaaatgcgcggagctgattccggattacttcggttttgtcagaggtatcgtggactctcaggatctttccctcaatatctcgagagaaatgctgcagcaggataagcagctgaggaatatggcgaagagtatcgaaaagaaggtcagaaacgagctcctttccatgctcaataccgacagagaaacctatgctaagttcttccatgatttcggactggctctcaaattcggcctctataacagtttcggtcagctgaaggaggagttggaagatctgctgctgttttattcctcttccgaacagaagatggtcactctgaaagagtatgtgtcgagaatgaaagaggaacagaagtatatctattacgcgacgggcgcttctgtggagaagatcgaaaaactgccgcagatcgaactgattcgcgacaagggttacgaaatcctctatatgacagacgatgtggatgatttcttggtacgtattctcagaaactatcaggagaaggaattccgctccgcttccggcgaagatctcggtctggaggaaacggaagaagaaaagcaggaattcgaaaagaaagcggatgagagcaaggatatgctgtccaagatgacggagatgctgggaggaagagtaaaggaagtaaggctttctcacagactgaagtccaatccggtctgcctggcggtagacggcgatgtatccatcgaaatggaaaaagtgctcaattccatgccgacaaaggataaagtacagtcgcagaaggttctggaactgaatccggatcatcccgtattccagtcgctggtcggtgcctacaacagcgaggatacacagaaactccgggtttataccgcgcttctgtacgatcaggcgatgctcatcggcggcctgaacatcgaagatccggtgacgtttaccaaccacgtctgcgaactgatgaaataaaggcgcggcggtatcctctcggatatcgcgggacgcggaaaagtcttttcggattacctgaacccgtagcaagagaaagaaacgcatccggatgaaaaaatccggatgcgttttcctgttttacgggaagaatgaaatatgttactatgaatatatcagaggaacatagtgccggtacgtcccgctgttatcagcggcgggatccgtttccggattttgacggtgatttgtatgcagatccgcagaaatccgtaaaaacaggctgtttccggtgctgtgctgaaattttcgcatgtctgaatcaggcggactggccggtgcaatatcccggtcggaagaatgcgaaaaacggtggggtgaaggaggatggcgaaacggatgaacgcaggtgagaagagtctgttaaaagcgctggatcagggcggtatcgtagcgctggtagatcagtacggcaattatatatatgtaaacagacgatgggaagaggataccggcatgacctcggatcaggtgctgggcaaaaatgtggaagacgtcgtttccggttcagccgcgatgctgtctctgcggacgggcagagtgatttcgggagaaatgtttctgcgttcgaaagcaggcagggagctttcttctattatgaaatatcagccggtctttgatgaagaaaaaaatgtgagcggctgtctcatcacttctctgttcagcagattggaggaagcgcaggatttttcaaaaaaactggatcagattctcgaagagtttcaatatctcaagtcgccggagcgcggttcttccggagcgaagtacagtgtgcagagcatcatcggagacagtccgggcatgcgggatgtcagagagcagatttatatcgccggagccacggcggcgtcctgtctcatcgagggagagacgggtacgggaaaggagctggtagcgcatgcgattcacaacgtcagtatgcgaaaaatctttccttttgtgaaggtgaactgttccgcaattccggaaaatctgatggaatcggaattctttggctacgaggaaggaagttttaccggaggcgtcaaaggcggcaaagcggggaaatttgaaaaggctcatttgggcagcatgtttctggatgagatcaacgcgatgagtctcaagatgcagccgaagcttctccgagctctgcaggaaaaagaaatcgagcgcgtgggcggtacggagagcattcctgtcaacgtccgcgtcctttccgcatccaacatgcctctcgattatctcgtggagcagggtgtttttcgccgggatttattctatcgtctcaatatcatcacagtaaagattccgcctctgcgccgcaggaaagaagatattcttccgctgactcaatcttttatcaaacggtataattcggaactgtgccggaatgtcagcggtatttccgacggcgcgctgcagtatctgacagaatacgactggcccggaaatgtcagagagctgcagaatgtcatcgaacgcgtcatggcctctacctgggaggatcgtctggatgttgaagtcttccggagattctctccccatctcagcgcagcgcagcggactgccataccttccgctccggccgctttggaagagaagccggaaacggcggtgaaaacgaaatctgtgcggacgccggcagaggagtcgacggcgcaggccggagagtctctgcgtgacgcggacgcttccacggaaatactttccttgagcaggcagaaggaggccagtgaaaaagaggcgattctgcgggctctgcagatcagcggaatgaataaatcaaaagcagcaagaatgttaaatatttctagaactttgctgtataaaaagctggaaaagtacgatataacatgttagaatatcggaggtgtgggatttccgggcaaaaatcgcggaaaagctaaaatagtgtaaataaaaatttacactattgaaatgcgattggaatacaaatatgtaaataaatatttacatattgtgatgtaagacggcgccctgaggatgaatgtcggattttacgtaaaattgtctgaaaaaaatatttttttacagatcatcggagaatcgctttatccttggaaaatcagtgatctccgatatttcgcagcgacctgtaaaaaataattaatatttttttaacaggattgtcaaaattggcatgcaaattgcagtatataaataatggcaagcgaagtgagagatgcaccgcaggaggtaatttgatcatagcattgctgcatgatttaaattaataaataatgatgcccgttctgcggatatgtgatctgcaaacgcatatgcgcgagagggacaggtatcaagttactcaacaaaccaatatcacaaaatttttaaggaggtggcttgtttgaatattttaactccatttgagtatttcgctccagaaactctggacgaagccctcgaactgttagctactaaggaaaatgccaaggtactcgccggcggcacagacttaatgattcagctcaaggaaaaaatgattcatccagcaaacgtaatcgatgtaactcacattcctgaattacaggaatttaaagtagaagatggtaagggtgctgttctcggcgctgctaccacggatgctttcattgaattctctgaagaaatgaaggctaagtaccctgcattagcttatgctgcaggtgaaatcggaggtcctcaggtaagagaaatgggtaccatcggcggtaacctcgcaaactccggtccttccgctgaaactccagcttctctgatttgctacggagctgaagtcgttctcgctaagaagggcggcgaaagaacagttcctgttgctgatttcatcaccggtaacagaaagaactgcctcgaagacggagaaatcatcaagagcgtcgttctgcctgaacctaaggctaatacatatgttaagtatgcatatgtaggtatgagacagtccatggaaatcgatatcgctaacatggcgatcagtttaactgtagacggcgacactattacagatgctaagtgcgtaatgggttccgtagcgattaagcctctggtttccgaagcagttcctaaggctctcatcggtacgaagctcggcgacgaagctgcgatcaaggcagcaggcgaagctgcacagtctgaagttcatccgatcacagacgtaagagcttccgctgactacagagtagacgttatcggtgcgttggcaagaagaatcttaagagaacttgctgaagaaattcagggctaatagggggtgtattcgacaatgaaaaaacagcttgttacattaaatattaacggcgaagatatggatttaagaattgctcctactgacgttctcgctgacgtactcagaaaggaagcaggtcttactggtacaaagaagggctgcggtcagggtgactgcggcgcttgtacagttattatcgatggtaaggcagtattatcttgcctgactctcgctatcgcttgtcagggtaaaaagatcactacaatcgaaggtatcgctgatcagaagaccggtgaaatgaatccgatccagaaggcgttcttaaaccacggcgcagttcagtgcggtttctgtactcctggtatggtaatgtcttcttacaacttattaactagaaatccacatcctacgagagctgaaatcagaagagcgctttccggcaacctttgcagatgtactggttacattctgattttcgaagctgtagaagcatgtgcggcagaaggcggggtgttataaatggctatgaataaaatgtatgaagtttctaatagatatcatgactataaggactacacgagagaatatacagaagtaggcagatccattcctcgtctcgacggtcctatgaaagttacaggtaagttacagtacacagacgacttaactttaccgagaatggtatatgcaaagatcttaagatctccacacgctcacgctgtaattaaaaatatcgatttcagcaaagctctggaattagaaggtgttctcgacgttctgaccggtaaggacttccctatcgattacggtatcgttgctcactctgcaaatgaagaagttctcgcaagagaaaaggttcgtatgtggggtgaaccggtagctgctgtctgtgctatgacagaagaaatcgctgaaaaggcgctcgaactcatcgatgttgaatacgaattacttccggtaatcgttgacgcaagagattccgaaagaatggcaaacgaagaaggcgttctcattcatgaggataagccgggcaacatcgctcaccagggtaagcagcagtacggtgacgtagacgctatcttagctgaatccgacgttgtaatcgaacaggaattctattcctgccagtatcatcagtccttcatcgaacctcagtccgctttagcagacttcgacgttcacaagaacaagctccacttatacgcaacttgccaggtacctcactatactcaccagcagttagctaaggttctccagatgcctatgaaggacatcagaatcacagttcctctcctgggcggcggtttcggcggtaagggtgtagctactacagctgacttcattacttccaagttctcctccagagtaggccgtccggttaagtgcacttacgaaagatctgaagtattcgcacagaaccagggtcgtcacccttgcttcatgaagtttagaatgggcttcgataaggaaggtcatatcacagcagttgactttgataacctgatggttgcaggtgcttacatgtcttggggtgttgtagtattattctacacagcttccatgactcacctcccttatgtaactccggctgctaagttctccggtaagctcatctacacaaatacaaacacttgcggcgcgcacagaggtctcggcggttcccagccaagattcgcaatggaaatcttaatggatatggcagctgaaaagctcggcatgactccgttacagatcagattgctcaacgcagtagaatccggtcatacttgccgttctatgatgtatgtacctcatacagaatacaagaagactctccagactgctgcggataactgtgacttcgaaaacaagtatggcaagcttccgtttggtgaaggtgttggtatctccggcggttactatatctccggtacttcctacactctgtacctctcctacaagcctcatactgtagctaatgttaagatcgaaggcgaaaacaacgtagtattatactgcggtgctacagatatcggtcagggtgctgacatggttatggctcagatggctgctgaaactctcggcgtaagatccgaagatgttaaggtagtatccagagatactgagctggctacattcgacctcggtacgttcgcttcccgtgtaacttatgctaccggctgggcgatcagaagagcgtgcgaagctgctaaccagttactcttccctgtagctgctgctatcatgggctgccgtggtcaggaagtcggcgttaaggactatcagttctactccatctatgaaaagaagagaaagaacgttgactggaacgaagttgtagatcagtacatctctgctaacggtccgctcatcacttccggacagttcacacctccaagaagaaagggtatccagcagggcggtaacatcggtcactcccctacattcggtttcacgactcagatcgctcacgttaaggttgacctctacaccggtaacgtacacgttctggacatcacagaggcaggcgacctcggtcagccgatcaaccctatgtcctgcgaaggtcaggttcacggttccatccagatgggtctcggtaacgcattactcgaagaaatgcgttatgcggaagacggcagattactcaacccgtctttccacgactacaagctctgcggaactttagatatgcctgaaatcaacgctgagatcgtagaatcttacgacccatccgctccttacggcggtaaggaatccggcgaaggtcctatccagccgacacctcctgcaatcttcaacgctgtatatgatgcgatcggttacagatgcacagaacagcctctgacacaggaaaaggttctcaactacctcaagtctatcggtaagaacctctaattctctgcgaattaacaaggctatttttcggaagcggcagatattctgccgcttctttttatggtgaaagcacggcgaaagatgtatggaaataatcgattttcctatgttctgcggtgttgcctttacatacatctttgtatgtcggtatataaaattaatttgatattttttagacatttttgttatccttgtatcttatcttcttttatatttttgtctcttcgcatcccgatgattgcgatacgcgcagatttttatgctgcggcgctcaaatgatatgaaacaattctattatttttatagataattcatttaaaaaaatattcaccgatggcagtgagaccgtaattttttctgaaaatgttaaaaatatatcacacaatttttctgcatctgtgcggatatgagaaatattgttgacttaagcttatatttaggtataaaataaattcagttcgtatataaataatgttcgattggaggacagataaacaatatgagtaatccatataaaacccgtgagggcggagcgacggtaacagtattcgttccttatgactgccaaaataactgccctttttgcgtaaataaggaagaatatgaaaatatggaaggtttcagtctcgagaagatctgcgagagcatccgtgtgatggacgggattacgccggaatgcgattttgtattcaccggcggcgaaccgttttcgaatcttgaatctcttcagatcctcctggatcaggtgccggcgacgcataaggtctatatcaatacgacattcccggtgtttgctgaccgtacgggtgatgagatgatcgagtttgtggagcgcaacaaggacaagatcacctgcatcaatatttcccgtcacctcgtaccttatgtggaagaatctccggatgagctgatcgcgagaattccgacgaatacccgagtaaactgtgtgctctacagggattatccgagagacgaactggtgcagtatatgaggcgttttaaaaagtatcgtattccgattcagttccgtttcgattatacagatacgacaccggaaaatctctatgatgaagaacacgatatgattctcagagatctgaaagaattctgcagatataccggtcttgacggctgcagaatgcgctgcggatatcattttgattttgaggggctggagctgacttatcataagacgctgccgtacagcacgatcgtggaaaatgacggtgaccagacatatgatattctttacgatattctcatcaaacagaacggcgatatccacggcgattgggacggcaagattctcgacgtggaaaaatacagaaacgttacctttgagccttacgatctcagatggatcgaaacctgctaaaatatgccggacgatttttccgctccgcagcgcctgctgcggagtgttttttattctaaaatgattttaaattttgcgttacaggagaaaaatccgggtatttatacatcgtaagccgcaaatcagcacagacttcataaagacccaaaacccggcggctgcaatgactgaagaaaaaacttgttcttgctatattatcgaaaatgaattagaataattgtgcaagataatcatagcggatccgatttcagatccgtttttttatcgcaatcggtatcggaacgaaataaagaatcgaaagaggcgaggcatcgtcagatgctccgcttatttgtctgcaagccggcggatacgcggttgtttccggtgaggacagagcgttttttcgattatgatgccggcaggcgagggacgatgccggcatcccattcctgtaggggatgaactgcaattggaggcttattttgaagaaggaaatcatcagaacagaagatgcggtaggcaagattttagctcacgatattaccaggattgtaaagggagaatttaaaggctctctctttaagaagggtcatatcatcgctcccgaggacgtggaccggctgctggatgtgggaaagagcaatatttatgtgctgcagctttccggcagcgaagttcatgaggacgaagcgggaatccgtctgggagctgcgatcagcggcgaagggatttatacgcagccgccgaaggagagccgcgtcaatctgtttgcagaacttgacggtttgctgaaaatcaatgaagaagcggtacaggagatcaacgacctgccgctggtcatatgcgcgacactgccgaatcatacgccggtagtcaaaggacagatgctggcggggacgaaggtgattcctctggtggtcgatgaggcggatatcgcggaggcggagaggatctgcagcgaagcggactgggtcatcgaagtcaagccttacaaaaagaagaaggtgggatgtgtcattacggggagtgaagttttttataaccgcattcccgatgctttcgctcctgtgattacggaaaaagttgaacattatggatctgagattctcgagatcacctatgctccggacgatctggatatcatctctgaaaagattctgaatctgaaagcaaaaggcgcggacgtgattttcactaccggcggcatgtcggtggatccggacgatctcacgccgacggcgattaagaaggcgggggctgatatcgtcacttatggcgcttctgcgcttccgggggctatgtttatgatggcttatctggacgatacgccgattctcggcgttccggcctgcggtatgtttttcaggacgactgtcgtcgatcttctccttccgagagtcttcgcagacgaaaagattacaaggcgcgacattaccagcttcggcgttggcggcctttgtatgcagtgcgacgtctgcgtatggccaaagtgcacatttggaaagtaaattttcggacaggtaatctgaacccggtccggcggacagccgatgggtttttaaataagataaaataagaaattggaggaatcaaaatggcagagtatacgagagagtggaaatacagagcctggcatccggcagagcagaagatgtattcgccggaagatctggaagaaccggatacagaagaagacgcgccgaaaacgatttacggacagctgatcgacggggttcttcatattgcggacatcaagacacagccgccgaccgaactggtaccgatgcagagcaccaactggtttgatcaggagcagttcgaagtgtacgaaggcgatatcgtggaaatcgacggaaatccgtttcaggtgatctgggacgatgagatctccggatatctgcttttgggtctggatggcacgatttcaccggggggagcctatctgggcgacgcgatgaagatcgtaggaaatgtcttcgaaaacggggatgccgatccggaggagcgcagacgtgaattgaagttcagagcctgggatccggacgctaagatcatgtatgagccggaagatctgaaagatcctcagacggatatgatgatttcactttatgcgtatctctctttcggcgctttatatatctatgacttaaagaatgatccgccgatggagctgattccgatgcagaagaccggctggaaagatgccgacggcgcggagctgtatgaaggcgacattctcttctatggggaatatgatgaagtaattcagatcgtatggagcgatgaagtcggtcagtttatgctgatggcaaacgacggaactctctctccgggagataagatgacagtagagcagaccaagctggcgggaaatatctatcagtcgcctgccatggtacctcagctttagtaaaggagtgttcatttatggaagagaattacaagagactggatatttataataaagatattattgaaaagttcgacggtatgtacgttgatttttatcttgaggacgacatgttcgaaattgaaggtcagttctttacgatcgacggtcagctgtatatcgaagtacacgattccgtaatgcatatcctggagatggcgggcaaagagctgagggtaggtcaggtaggagaactcttcaccgccaccagaccggataatcaccgtttctacatggaaatcaaccgggtttattatctgatggaaaatccggcagcggctgattttatggaaatgttcgaaaagaacggggtaagccagttcttcctcaaactcacagacgttatggtgaagcatgacggagagacaaacaaatggaagattaccaaaaataagatcaatatgtattatgtgggcgatacgatcgaatatgattccatcgaagagctctgcgcggacaatgcggacgtgatgagcggcacatggcaggcggtagtctatgaggcttatgaggaggaatccgattttaccgtctggcgttaaacggaggtatttatggggaaagtcgtaattgaaagcggtacgatagattttgaaccggtaagacacaaagaaggctgcggcagatgtccgtccgggtgccgaacggtatgccaacgctataaatcagtaggttacgatatcgtcgaaggcgagatggacgattttgagctggttccgattacggtggattacggttctttccggaagccaaaaccggacagcggagaagagtaagaggactgaaatggaatttaacggaaaaaaagcagatatcgtgtttacgataaaggcggtggagagtattccctgtgatctgagaggacaggttctgggttttgacggaagcggagttcaggtctccgagccgatcgagacgccgtggccgatgccctgggtgacagcggaaatcacgaagtacgcatccggtgaaatcgaaatgccgaaagaagataaattccgaatctataatccggaagaaccggatcagtatgtattcgtatctgtggagagattttaaccggcttttacgagacacgccgccaccgaaaagagaaaaggcggtataaacagcataccggcggttacatgcgcggaaagggatcgttttagatttccctttccgcgtcttttcgagccggcagcgggaaagaggacgaagcggtcttacaaaagaggccgcagagggaaagtgcaaatgctgaaactgatagtaacattgaaacaggcgccgaaatcgaatatggtttccatgcaggaaggaacaaatatcgtagtccgaaatccggaggacgcgatgcttacgtttgacgactgtaatgccttggaactggcaatgacgttgaaggacgccatgggagacgacgtacatatcaccacactcagcttcggaaacgacaagacagaggaaattctgcgggaatccttggctctcggtgtagatcgggcgattcttgtaaacgacgggcagatgagagggtcggataccctggccacggcgcgggctctcgccgccgcggtgagaaagatcggcgactttgacgccgtgctgacagggcatgccagcatggacggcagaactggctttgtgggccccatgctggccgaggaactccacctgccgtatctgacaaacgtgtgcgaatttgagaagcacggccaagggcttaccgtaaagcgggatttgggctccgtcatcgagacggtggattccggctgtccggcggtgctcagcaacctcaagaaaaaatacagcctgagagtcatgtccattgcggggattcgggctgccatgaaaatggaaatcgaaagatgggatctggaggacatcggactcgatccggcaaaggtaggtctttccgccgcgggggttgtcatcgataaaattcgtccgtcgaaaaaggaacgactgcagatacagatgtttttcgatcagtataaagatggagatttcgacgatattctcagagagattcagcgaataaaataagtgatgtaatttgcttcaccgaaagagatcagaggatctgttccgtaaatttcagcgtttacggagcagatttttgtttttatctggtcggtgttcctgtacggaagaattattttatgagcggctgcaagtgttttgatctgtttctgaagctgacagcggcggagggaaatcgaggagccggacgagacgtacagcgccggattgagatgaaatctgatacgctggaaaacggagcagaggatcgccggttgagaaatattgaaatttcagttattatatgacatttgagacggtctgccaaaaagcgcgctgattcagtgattgtttttatataaacagaaaattttggataacatgcataaataattccaaaaaaagcagagaattatttttcaggaagaaaaaagattgtacagatgcacataattgtttgactgaattaagttgatggtatactatatattattggtatgaacaaaatggcgagatttcatattatatactgacataatatatttgagcaaataattgacaaaatctataaaggctattataattaaaaggaagttgttatgcgtataaatatcgtctgtatacgcgcaggtccgaaccattttgattttgggcgatagaatgcacagaggaggtaataccatgggttttgtcgatgaaagaagaaaagtcattatcacacttacagacggagtttgggaatttaaagctctcgacggcagcgtgctgagcaagccggaaggagcggatgagaagcttacggcggcattggccgaaactgcgaaacagcaggagctcgtttccggagtcaacagcgcgaagatcactgttgacggaaaggactacgatctcgagatcgaaagacttctcgatctgaaggtaggcgaggttctcgaggagactgcaaagctctatccggatcaggaagctctgatctcatttgacggtacgaggagaatcgattataagacttttgatgaggattccaaagcgttcgccaagtacctgctgagcatcgggatcggcaaaggtgatcacgtaggtttatggatggcgaacggaatcgaatctctgaccgcagcttatgcgatcagcaagatcggcgctgtaatgatcgcattcacaccgtacgagaagcaggatcggatggaagagctggtcagaagatcggagatctccacctttatcctctatcggggtgcgaaggtgcatgagaatatcgaaatgctggcagacgatatgtatcctgagatcaaaacacagaaatacggcgagctctctttggagaaagctcctctgctcaagagagtgattctggtggatgcgacagatcagttcgcctatccgggcgtctatgatttctatacggctgtggaagaaggacgcgcgatggatgatgcggcatttgaagccgcgaaatccgcgtttaccgtaaaggatctggcttacgtcatctatacgtccggaagcacaggtttccctaagggcgtcatgctttcccacctcaacgtagtggaaaactcctatacgatggcaaaccagatggacctcacccatgaagataaaatgtgcatgcagattcagctgttccataccttcggatccgtagcttcctgtctgccttcgatacatagaggtatgccgattgtgctgacaagccggttcaagccgggagaatctctcgaaatgattcagagagagagatgtacgacggtatgcggcgttcctactatgtttatcggattcatcgacgaactgaaaaagaatccggataagtatgaggtatcctgcatgagcaagggaattactgcgggcgctccgtgtcctgagagaatggttcgtgaaatcgaagagatcatgcatatgaagaatatcatcatttgctatggtcttaccgaaacttctccgtgcgtatccggtacgaagacgacggatcctgtagaactgaagggcaatagtgtcggtgaaattatgccgggcgttcagattaaatttatcgatccggatactctggaagatgtgggtccggaaggcccgggtgaaatctgtgtcaagggctacagccttatgatgggctatctgggccagccggaaaagacggcagagacctttatcgaaggcggatggctcagaaccggcgatacgggaagtctcatggagaatggttatctgaagatcggcgatagactgaaggatatcattatccgcagcggcgaaaatatcagtccgggagaggtggagaaagttctgacttctcatccggatgtcgaagaagcgtatgcgatcggcgttaaggattacaaatacggcgagatcgtaggtacattcgtcagacgaaaagaaggttccacgctgacagcagaagagctgagagccttctgtgtaggcaagacgcctacgctgtcaattccatcctattactggttcgtcgatgagttcccgcttctcaataacggtaaggtttccaaaccggaactgagaaagatcgcggaagctacgaaggaggatatgccgaaaatcgaggctccgaagaaaaagtaatactatcagttaaagaaaatgattaagagaggatgtattctatgttcgatattaatgaagagatgacatatttagtttacgtcatgcaaaaaagaatgcgtcgacagatgtctgctgctctggacagagatgatatcactctggaacagtatgtggtactttacaatttagttgatcaggacggtattaaccagaagagtttatcacataaagtagacaaagaccaggctactcttgccagaatcctcgatattctggagaacagaggttatgtggtaagacgtacgaccgaaaaggaccggagagcatttctcgtcttcattacggaagagggaaagaataaggtcaaggaaatcgcacgccgcctggggatggttcacaaggagattgtggagggcatcccgtcggacagggtggatctgtttgtggaactgatcaagcagatgaaccagaatctggcggaaaaagagatgaatcagtagttagggggtttccagacttctgagaatgaaatttccggtgcaaagtgaataaaaattgccgagagcgttccgaaaagccgcaagagcggctcgggggaacgctctctttctgtattttgataaagtaaaattgtaaatacactgtaaagaatggtaaaataggttttaatatgacttccggtgttatggaaaagctggaaaagagacaaagtaatagagatgcagaaagggtgtaagttggatatgcagacagaagagaagaagcggaccggtgtttgtcgggaagcgttttcagattttagaaaaaggtacggcatctgggcttttgcagctgcggcgctcgtcctgatcaagtacgtgtgtttttacagttttatggggatatcaaatcatttcattctggtttgcgcgctgagctgcctgctggtatttttgtttttctgcgcttttcggcgcaagggtattccggcggtgctctatttgctggcgtctcttctgatgtttgcaaatgtgctgtatcacggatattacaattcctatctgacggtgcggatcatcaattccgctaagatggtcggagatattaccgcatcgatcagcgaattgatcaaaccgcagtattttgtgctctttttagacaatattgcgatttttgccgtgctgattttgtcggctctgcggaggagaaagcagccggagagttcttattgcagtctcaagggaagaaaatcttacgatgtaccgaaggcgatcaaagtttttgcgtcgtcgtttctcgttttttttatgctgttcaatccggtgggttccaatctcgtggcatctgtatcggcgcaggaactgatgacgtatcatttgagggacctcaccgggatttcggacagcggaagtcaggagccgtattacatcgctacgggaacctatgagacgacgcttccgggtgcggacggcagtgagacggaggagaacggtgaaacattgcaggaaaactcttctgcacaaggacgggagaatctcttcggcgccgcgaaaggcagaaatctcatcgtcattcagctggaggcgtttcagaattttgccatcaatcgggaatatgaagatcaggaactgacgccttttctcaacagtttggtcaacgaacaggaatcggtttattttgaccactactattatcaggtaggcagcggtaatacttccgacgctgagtttgctacgaacaattcgatcctgggtacgatgtcgagttatacgtatactctttatcagcagaattatttccgggggcttccggtgctcctgaaagaacaggggtatgagacggcggcgatgcacgcttacgaaaagacattctggaacagagaaaacatatatccctccctgggattcgaccatttcttcgacagcgattattatgaggacgacgaggattatacgggctggagcgtggtggctaccaatgacaagagtttttatcaccagtcgatagacgcgatgaaaaccatgaaagaaccgttttattcctttatgattaccctgtccggtcatcatccgtttgaacagaaggaggaagactgcagactgaaactgaaggatccggtgaaaggaacgatcgtaggagattatctgaattctatccgttatgcggacgaagcgttagaaggtttttttgatgagctgaaagaagaggggctgtacgagaatagcattatctgtatttatggcgatcactacggattatcctgtacggatcccgagataaaaaaaataatgacagatctcatcggggaagattataattataaatggcatttcaatattcctctcatcatcaatataccgggcagcggtgtcagcgagactatcagcacggcgggcggccagctggacttcctgcctaccgtcgcatatcttctgggaatggaaacgctggacacgatttatctgggacagaatctgattaccgctgatgagggctttgcggcaattcagcaattcttgccgaagggatcttttatcgatgacgacgttgttttccgggcttccgatgacggtgtgttttccaacggtaccgcatgggaagcggacagcggagagaaagcgtctatcgaggggctggaggaagaatccggaagatcttctcagtatgctgatctttcagagttttatctgaaatatgatgttctggacaaagttttaaatgagaatatgtccatcgatgagattttgtcggggatggattccaaaggaaaaccggcgcggatcgcgatgccgttatcctctctgaaggcggattccgacggaatttccgctttggacaggctcagacagagcgtccgggagggatactgctatcttcaggtcagtatggcggcggatgaggattatgaaaaaattatccgttcccgtctgaaggacgagaatggccagccttacagcgaatctacgctgctgcgcgtcggtgacgtctgccagtttctcgcggagtatccggatgtgacgctgattctcaaacctgtggcggaagctgaggaagaagcggataccggcaagagcggccgggcggaggaaggttcgcagcagttatctgacggtgtgacgcgtctgtgcgaaacctttgcggacgtgtcggagaaagcgggaatcaccggagagagatatgtatggcatacgtcggatatggaacactacgcggcggcggaacgcatcggctgtgaaaatattctcatcgaaccggatatgagcgcatatgaaattcataactggaataacttctttatgacctaccatccgtgggcgatttttctaccggaaaaagtttccgctctttacaggaacgacctctcctcctcttccagtgaaatttatctggttcaggacggcgcctacgatgattctcatcaggaacggatggaactgatggaggcatacggagaggtaacttatgagccggagccggaaggtcagacggaaaaagaaatcatgaggcttcagacagtcagaaacggagcggagggagagagttccaatcttatcaccgaatctctccgctatatcagcaacggaaggcatcccgcggcgggaacagccgtggtttttcttctctccgcagtgatcgcgctgggtgtctttgcagatcgtaaaatcagaaggaacaggaacgcgcgaaagatacaggaagaataaaatgaaaatatttgccatatcggatttgcatctctctttctcgtcagacaaaccgatggatgtcttcggaccggaatgggagaaacacgatgaaaaaatcagagataactggcttcggctcgtctcgccggaggatgtgatcatcctgccgggagatctttcctggggcctgaagctgaaagacgctgaagcagattttcagtgggtgcatcgtcttccgggcaggaagcttctctttaagggcaatcatgatctgtggtggtctacgccgacgaagctcaatgcgctttacgaagatatgatttttctgcagaataattattacggtgcgggagacatcgctgtctgcgggacgagaggctggaagcttcctcagacgtctcagaactggacgtctcacgacgacaaaatctatgccagagagcagctgcggctgcgcatgtccttggaagcggcaaggaaagacggctatgagcggatcatcgtagcgatgcattatcctcccgccgaaatgaaaaacagcagaaatgagtttactgagatcatcggtgaattcgagccggagctggtaatctacggacatctgcacggcagctatgcccgtcagttttcttttaacgggcgtatcggagcgacggattatcgcctggtgtcatgtgattatctgggatttgttccgattctcgcggcgcagacaaaagagagccgcggagggattctttgtcaggaggggaagacatgtttgcgaaaagacgagtaatcctcattatcatggacagcgtgggagcgggagaactgccggatgccggacgttacggcgatacaggctctcacacgctcaatcacatctttgaaagatatccgcagatgaatctgcccaatctttcctcgctcggtctcgcatcgatttcgggcgtgaagatcgctccctttcgcggacgcgtccagggagcttacggaaaaatggcggagcgttctgagggaaaagataccattaccggacactgggaaatttgcgggcttacgatggatgagccttttcgcacttttacagaggaggggtttccagaggagtttatcgcggcgtttgaagcgcgtatcggccgcagtgtgatcggcaattattccgcgtcgggcacggagataattcgtgttctgggagaagaacacaggcgcaccggcagtcctatcgtctatacctctgcggacagcgtgtttcaggtggcggccaacgtggaagtcatccccatggagacgctttacgagtattgtgaggcggccagagagctgctggtgggccagtggctggtgggcagagtgatcgcgcgtccttttatcgaaaaagacggcaattatgtgagaatcagcggacgccacgattatacctacgatcctaagagtgagacgattctggaccgtatcagccaggcggggcaggaagtctgcgcggtgggcaagatcaccgatattttcagcggaaacgggattacctcctccgtatataccaacggcaatgacgacggcgtctaccgcactgtcgaatatatggagtcctgccggcagggactgattttcacaaatctcatcgattttgattccatgtacgggcaccggcgcgatccggaaggctacggcagggcgctggaagaattcgacgccatgcttccggcagtcatccaccggatgaaaccggaggatctgctcatcatctgtgcggaccatggaaatgatccggtacacgccggctggaatcacacccgggaatacgtgcctcttctggtgtacggggagatggtgcgtgaaaatacagatctgggcattctgcgttccttcgccgatgtaggagcgtccatctgtgaatatctgggcgttccgaagatgaaaaacggaacttcctttctcagcagaatacggaaatgatatagcagcggcgccgcgaaaaaactgcggcgttcttttttgtctctcagtctgacagacaatcggctgcggtgtggaatgcagataaattgtatcggacaaaaacattttttactggcaaaaatcggcgaattatgatatactctgaatatactttcggatatataaggtatattcgcaagacgaagagaaatttcaaatagaaagaaaacgtcagactggcgggaaagcggatgcggctgttttccgggctcagctgacagttgaaataacatcggcggctgaattttatttggccgccgaatcattgtcctaaagagaatcgacgcctcgaagcaggcggtctgttctgcagtggtacaggagagatcggactatgagcaaaaaggcaaaaataaatgcggaaaatatgtatctttcagcgcggctggaagcgaaactggcgcaggcggagacctatccgctgaccgtcatcgaagcgccgatgggttacggcaagacgaccggcatgcgtttttttctgaaaaagagggaattgccttatgtgtggatttccgcttccgattcctcgcaggattatttctggcagcagttctgccgggctttttctcagattgattcggatgtatcctgtgagctggatgcgatgggatttccaggagataaagttctcatcaatatggtgattcagctgatcggtacggtgacggtgcgtcagccggttttgtttatcatcgatgactatcatctcgtcggttcggtgaagatgaaccgtttttttgagttcttggcgagagaaaacgcatccggaattcattttgtcctgatggggagaaaccggtttgaaaattgccgcgaggagctgaagctgaagggtctcctgctgacccttaccgacgccgatttccgtttaaacgatgaagagtgcgggtggtattttgaatcctgcggcatgcgaattaccagagcgcaggctgcggaagtgtgcagaaatacagagggctggatcagcgcattataccttcttctgctgggatatgcggagtgcggggaattgacgacggcggaaaatataaacggtttattcgaaagttccctgtatgagaattattctgatgatcagaaggacttcctgctgcgcgtcagtatcttccgcgagtttacaaaagagcaggcccggtttgtccgaagaaaggcggatccttcccggattctcgatgacatcgtagcttccaacggatttatccgcttcgatctgaaagagaaagtatatcatattcataatatgttcgccgattttctccaggagaaactggaagagcagcggcgcgaatatatcgatgaggtctatcgccacggggctgactggtattatctcaacagagaatattatccggcgactctttactattaccgcagtcacgattacaatgagatgctgaaggcttttgagcgtgacaaagcgaacggtctttccgcacggagccgagagacgatgatcgaagctttcgatgagtgtccgaaagcgatccgtatgcgccatccgatggcgaatcttctgtttgctaagcagctttcgatgatgaatgagaaggaacggctgcgtcagacgatgagggagctgaaggattatttcgagacggaatctctttcggagagcagaaaaaaggaattgagcggagaatattttatgcttctaagttttctgtcgtacaacgatctggagcggatgatttactggcagaagaaggcctcgcagcagctgtcgagaccgtctctgctggagggagccggtggaagtttcacttacggttctccgtcggtgctccatatgttctaccgggagccggggacggctgacgagctggttcgccgtatgcacgagagcagagatctgtatcacaagcttaccgacaagaacggctttggatccgattacatactggaagcggaactggagtacaaccgtggaaattttgacagagcggagattctgtcttacaaagcatttcatctgacttcgggtcagaatcagacgggaattctcgtgtgttctctttttctgcagtcgagaatctctctgcttcggggggatacggaacggggattgtctctgctgaaagagctgagagaagctgtcgtcgacagccggcgttatcttttcgtccatactgcggatatgtgcagggctttcattttcgcttctttctgtcaggtgtccagcgtgcccgagtggattgaagaggggaaattcgacagtatcagcatttatcatcccgcgctgagttttgtatctatcgtctacggccgggttctgctggaaagcggtcagtatgccagatatctcggtgaggccgatcagcttctggcggacgccagagaatttccgaatctgctcacggaaatatatcttcatatctattcggccgtcggttataaaaaaatgggaatgaacagcgaggcggaggactctttacagctggcgctgcatctcgcatgcgaggacggaatttatatgccgtttgtcgaaaatgccaaagagattcttcccctgctgaaagatatctcgcaggaaaaagaagaatatttcgttggacgcatcaaggaaatatataccgaaaacaagcgaagtctgtcggcggtcttagaggatgcgaaccgctcctctttgagcattctgaccaaaagagaacaggaaatcgcactgctggtctctcacggaaagacaaatgtagagatcgccagagaactcaacattgcggaaattaccgtcaaaaaaagcctttccaacatatattcgaggctgggaatcaccaaccgggcggctcttgccagacatataagctcatagatcgaaatatttgtatacaaatgtttgtatgtcattttgaccaaagacagataacccttgcaattacagggccggaagcgaatcgtgccgacggctctcgttttttgccgaaaaaagtatactttggtatactatacagttgtcagacgaagcattataatgtactcaagaattgtgtggtaaaggttatggtttgtgacctatgaccagttacaattttgtacctttataatttaatatatgattcttttgttaggtacgatttatcgttttgataatttcaaaacgcacttttaatgcatcgttattgatgtacattcttattgaaaaggagagttttcaaatgagtgagaatcaaaatctgacaaaaaagagatggtcagttcttatcgtgagctgtatcatcaacgtaatgatcggtactggttacgcttggtccatgttcgtaggtcctctcaatgagcatttcgttgctatgggatttgacacagctatggctaccttaacttgggcgtttacactggctaactccatcggacctatccctatgattatcggcggttatatcaacgataacatcggtcctaagtggtccgtattcgtaggcggtatcttcttcggcggcggcgtattcgttgcaggctgcgctacaagcccgatcatggtagtagtaggctacggtatcctgatgggtctcggtatgggtctcgtttacggatgcacgatcggtaactccgtcaagttcttcccggacaaagccggttttgtcggtggtctgacgactgctacatatggtctcggttctgtaattctgccgctgatcatcgctaagatcgtaaaccctgatacagttctcaacacattcaaggttctcggtattgtttacctcgtagtcatctgcgtcggcgcattcttcatcaccagatgcccggtcggtttcgttccggaaggttaccagccgccggctcctaaggcaggcgttaaggctccggaaagcaagaactggaagcagatgctcgctgaccctatcttctacgtaatggtaatcatgatgacggcaggcgctacattcggtctgatgatgatctccaagtgtaagccggtaatcacagctgttatcttagaaggtgacgctacggctacgatcgctactttatctgtaacgattctggctctgttcaacgcactgggccgtgtaggctgcggtacgatttccgataaaatcggccgtatcaatacgctgacgatcatgctggtagttggtgttgtaggtctgttcttaatcagcagagcaggcgctggcgatacagctatattcatggtaggtatctgtctcgtaggtctggcattcggttctttcatgggcgttatgcctggtttctgtgcagaacagttcggtcctaagaacaacggtgtaaactacggtatcatgttcatcggtttctccctggcaggtatcgtaggtcctaagctcttagacgcattcgaagcgccttacactacagcttattacatcgctatgggtctcggtatcgtaggtctcttactgacattcgtatacagagcgatgagcaaagcgaaataagcagatttatacttttagaaatttattaaaatttattaaatcaaaagaatcatatgatgtacggcttctccgccgtacagaaagacccggctgagaagccgggtcttttattttttatacagcggcgggcagcgcggggaaaatgcggaattcggcgggagacagcgttttttatctgcggattcttcctccggtatttttcttttgccgcgcattgacttgcagttcactatgagataagataaaaaatagtttgcggggggaccgagaggttgagaaggtagaacctgacccttagaacctgtcagttaatactgtggaagggaagcaaagtcgtgttcggacgcgggcacgggcgcgggatgatgccgttttctgcaaaagcctgtacggtccgggtttggagtgaaaggcggagcgcttccttattaaggaagcgcttttttctttttcggcagaatgacagagaatcgcaacgaagagtgcaatggatgaagaaaaacagaattctaatgaaaagaggagaaagatatgcgcgaatataagacgcagatggaagcggcaaaaaagggaatcgtcacttctgaaatgaaaacagtagccgaaaaggaaggcctggatccggatgtgatccgtcagagaacggcggcggggacgatcgctattccgtgcaatatcaatcacagatcgatcagcccggagggaatcggtcagggcctgcgtacgaagatcaatgtcaatctggggatttccggagactgcccggattacagcagggaaatggaaaaagtaaagctgtcgatagagtacggtgcggaatccattatggatctgtccaattatggaaagacacatgattttcgccaggcgctcatcgatgtttccccggcgatgatcggtacggttcccatgtacgatgcggtagggtatctggacaaggaactggccgatatcactgctgcggaatttctcgatgtagtgagggctcatgcgcgggaaggagtggactttatgacgattcacgccggaatcaatcgcagagctgtcgagggatttaaaagagaaggaagactgacgaacatcgtatcgagaggcggatctctccttttcgcatggatggagatgacaggaaatgagaatccgttttttgagtattatgacgaggtgctggagatcctccgggaatatgacgtgacgatcagcatcggcgatgcgctccgtccgggcagtattcacgattccactgatgcggcgcagatcggggaactcatcgaaatcggccatctgacgaaaagagcctgggaaaaggatgtgcaagtgatggtagagggaccggggcatatggcactttctgaaatccaggcaaatatgattctggagaagcggctctgccatggcgctccgttttatgtattgggtcctttaattacggatattgctccgggatatgatcatatcacttcagctatcggcggcgctgtggcggctgccagcggcgcggactttctctgttatgtgactcctgcggaacatcttcgtctgccggatctcaacgacgtaagggaagggatcatcgcggcgaaaattgcagcgcatgcgggagatatcgccaaaggccttccgggagcgagagagatcgacaatcgcatgagcgacgccagaagacgtctcgactgggaggagatgttcgggctggcactggacggcaaaaaagcgagagaatattttgaaagcgctctgccggcggatcagcacagctgttctatgtgcggaaagatgtgcgctatgaggacgacaaaccgaatcctcggaggcgaggatgtgacgctgacaaaatagaggaaacgatgcgctctgcggcggatctgcctttgagggacggagaataatcggcgccggaattttttattcccggcgccggactgcatttttgcctgagatgacgtccgggaaaagagaacaggagatttgctgtaaagacaggaagaaatcgcagctttcggaaacggtaaacaggggtgtcctgtgtagagaaaaattcgtcgtattttgatatatctcactgagtaaaaattgcattttgaatacatggttgtaagtattgaacaaataccggaaaagagttacaataacagttaaccttaaaaagaacggaggcggatcatatgagcagtcaggaagttttatatcaggtatcagaggttatcgaagaccggaaaatgaaccctcaggagggttcttacacgaattacttattcgataaagggctggataaaattctcaaaaaagtcggtgaagaagcgacggagacgattattgcggcgaaaaatcaagaaaaagaagagattgtatacgagatcgcggatctgatctatcatctgaccgtgctgatggcggtgactaacattacctgggatgacattctcagtgaactggcgcggcgggagctgaaaaaaggcaatctcaagctgagcgataaaccggaaaaagtgacagagtattagaaaattttacaaggcggtgagccgttctttttcgaagctgcaggatgtctgcagtacagaaaacgcacttttggcagcgccgcggattcaaagaagaagagacaggaaggcgaaagatcttcaagggcgatagttaaggagaattgcagatgattacaggggcaaaggcgatggtagaaggcctgaaggaacagggcgtagatatcattttcggatatccgggcgctacgatctgtccgttttatgatgaattggcaaatgacggatcgattcagcatattttagtcagacaggagcagaacgcgggacatatggcgtccggttatgcccgccagtcgggtcgggtcggcgtatgcgtcgtcacgtccggtccgggggcgaccaatctcatcacgggaatcgccacggcgttcatggacagcatccctgtggtcgcgattacgggacaggttcccactgctgttctgggaagagacgttttccaggaagtggatatcacgggggcctgcgcgccgttcgtcaaacacagttatctggtaaaagatgttactcagattccccgcatcatgagagaagcctttcatatcgcttccacgggaagaccgggaccggttctgatcgatgtgccgagcgatgttcagaatgaacttttcgaatatacagatcccggcgaagtaaatatccgtggatataaaccgagcgtttcaggaaatccaaagcagatcaaaaaagtagcggctgaaatccagggagcgaagagacccctgatctgtgccggcggcggcgttttcagttccggggcgcagaatttcatcagagaactcagcgaaaagggacagattcccgtagtgacgacgatgatggggctcggcgcgattccgtctgcgaataatatgaatctgggaatgatcggtcagttcggacataagaccgccaattacgcgctcaataatacagatctgctgattattatcggagcgagagtgggcgaccgtgcggttaccgcgccggaccgggtcgaggaaaaatcgcgtacgatccatatcgatgtggatccggcggagatcggaaaaaatatgacgccgacggtgcctctcgtaggggatgtgaaaaatatcctggagaaacttctcgaatacgatgttctgacagacagcggtgaatggattgaaaaacttcaggcgctggcacgggaagagcgcgaaaaggtatcggaaaagagaaaaggcactatcggaccgagaaattttatgcacgctctcagcgatcagctgaaggacgacgcctgtgtggtggcggacgtaggtcagaaccagatctgggcgagcaaatatatcgctattcgcagcggacggtttctgacttccggcggtctgggcacgatggggtattcactgcctgcgggaatcggcgtgaaattcgctgatcgcggaaagcagactgtggtcgtatgcggcgacggaagttttcagatgatgatgaacgagctgtccactgcggtaggcaacggcatagacatcaagatcgttttatttaacaatcgtaagctgggcatggtgaatgaaattcagaaaaaagcttattc

SEQ ID NO: 4568 - DNA, 12036 bp, Unknown
  16S sequences of unknown bacteria
ccgccgcaagcaatatcggaaaaaacagcgatttccttttgaaacgaaacggctatgttattgacagcgggcgcagatatctgaatatgtcacttccggcggtcaaggcgtatctcaaggagaaggtcatagatatgctccgcgacaacggttttaaatatgtaaagatagactacaacgactcgataggtctgggctgcgacgacgcggacggattgggcgagggactgcggaagaatatgcttgcaagtcaggagttttttaaagctatgcgcgacgaaattcccgatttggctatagaaaactgctcgtcgggcggacatcgtctggagccttccatgatggagctgtgcgatttcgcctccttctccgacgcgcacgaatgcgtacacatcccgattatagccgccgctctccacagagttattcagccgtcgaaaagccaaatctgggcggtactccatggaagcgacacgctcagacggacgaactactcgattgcaaacacacttctcggcgtgatgtgcgtctcaggtgacgtctacagtctctcgtcggagcagtgggacatagtagagcacggcatagctctgcacaaaaaatcatcggcagtcatccgaaacggcacgtcgcatttctacggaagcaagggagagagctattctaatcccacaggatggcaggcagtcgtgcggtatgacgaggaaacgaatataactcttgccgtgatacacaccttcggcggagaaataccgaaatgcgtgagtctccccgtgaaaaacagcatgataagcgatgttctttgctcggaaggaaatgctgtgattctcgaaaacggtcggctgaatgtggagctgaaagagaactttgaagctgtcgcggtgctgctgcggaactgaacaaaaagacaggggctttcatcggctcctgtttttatataaaaaaatgagtccggcgctttaccgaacccattcttgtttatctgactaatctgtattttattttcctgcggtatttttctgctccgctgagcttttcacttatctctcccgttttctcgcagtagcttatgtcaagcacagtgcagtctccgttttcatatgcgtagccgtcgcctgcgtcattgtaaagcgagaacaagccgtcttttccacagtatacccgcacttcacactcggcatttggatcttcgtcgacatactgcatgacgggtgccgtcggtataacagagcctgcgcggacaaacagcggaatgcggtctatcgtgcagtccacccgaacatagcggcttccgtcatatttttgctcggtataaaagtcataccatgttccctcggggagatacacgtcaatgtaacgctcaggcgactttatctctgtagaatccgcaccgtagtacatcggatgtgtgacagggcagaccaaaagctcgtgtccgtacatatactctccgtcagcgttatgagcagctctgtcgttcgggaaagcaagcgcaagaggtctgagcggcatgattccacgtgaagttacggcggcgttcagcgaataaaaatacggagagagcgaatacctcaactgtatcgccttctcgatagcgtcgcggaacatacttcccctctcaccgaactgccacacctcacgcggagtatctgttccgtgagagcgcatgagcggcgtgaatcccgcaaactgcatccaacgcgtgtaaagctccctgtagccgaggtcgtccgcaccattccgaaagtcaccgtcacggaaccactctcttccgtctctgacaaagaatccaccgatatcggtgttccaatacgcttcaccgcatgagatgtagttctgcgcgatgcgcacctgctttctcagtgtctcccatgccgcgctcacgtccccgctccatacgacggttccgtatctgtgctgaccgggataggacgaacgcgtcaggttaattactctcttgtcggaagccccgcgctgtccctcatatattccacgggagtgggcgagggagtaggcgtttatcatgctgtcgtcaatgtactttttgaattcatccgtggattttttcattctctcgggaagcggaggacgttcttcccctccccataccgcgtcaaacggctcggaggaatcgcaccaccatccgtcaataccgtagctgaaaaggttctcgtatgcctgcttccagtacagctttcgcgcatcttcgtcaaacgcattgtatacggaatggtcgcccagcatctttcccgcttcttcaaattcagccttgtcaagggattctccgctcatgttcggccaaatggatatcataaggtgcatatgcatatcgtgaagctcttttgtcatcgccgcgggatcggggtagcgggatttgtcaaagcgtttctcgccccatgcgctgtactgccaatacatccagtcctgaattatcccgtctatcggcacaccgagctgtctgtatttccgcgcagtctcaagcaggtcctcttcggatacatatcgctcctttgactggatatatccgacagcccatttcggaagcatcggcgtctctccggtcagatagcgatacccgccgcacacatcgtcaaaatcctctccgcagatgaagtagaagtcgagcgcgtcaaccgagtcaaagtaaaatcttccgtaccgtccgtcagttccgtcaaatgtcataagtgacgagcagtcgaacaggtacgcataacatttcgttgagacaaaatacggcagtgcgattcgcatattctcctgatacagcggaacaaactgccctctcaggctcgcgtagccttcctcgtgactgcctaagccgtagagtgattcttcctcagaaaatttcaccgtgagcttcgcgtgatttgagtatctcgaaaacgctctttccgcttccctcactgaggaacgtattccgtcaactgtctcccttgtctcaaccaatccgcctgttgtgctgtatatcgcgtattcctccatggaacacccgaacacacgcgagagtaccgttccgtcagccttttcaaaacgaatgtccggcttatctttcgcaatatgcacccgcagaaacgacgtgaacaggcatatctcctcaccgctctcttccatattaacagcgatattttccgcagcctttgccctcactatcatgctctccgacggagaatttttgccgtaggtcacacggacggacttttcgctcattacagtgataaagagtgcagtcccgtttatgtcaaagttaaatttattcatgttctttcctttttttctttaatccacccgagcggagtctgccccgttgtacttttgaacagctttatgaagtagctgacgttctgtattcctacagccgccgcagttccggttacatccatgccttcctcaagcagacgatatgcctcccgcagtcttacggaattaatataatttatcggagtgcagccgacataatcgcggaacaggcggaagagatatgtttcggatatgctcaaatacttcgcaagagttgaaacgttaagcggttctctgtagtgctctccgatatattccataatccttgtaacatactgcacgccgtataaatagttctcgtcggcataatgaaagcagtcagccttatagcatgacgcgaacattgcgaaaagatacgccgtcaccatgcagctttcgtgtcctatttcgattatcttctcctgatacttcagaatcccgcttatgataggcaacagttcgttataccattcgctcccctgccctgcttttgccttaatctggattttctgctcaagcatggcgtcaatgcgcttgtttacctcgtttcctccgctcatggttttcaaaattccgagactgaaaacgatatgcgacatcagcccgtgtgattttctgaaggtgcggtggatcagcccgggattgatgaagaagatatctcccgggacaacatcgtattctgttttatcaatatagagtgagccgcaagcctcggagtaaaatatctccatctcattatgccagtgtacgggtacaacaggtctgttaagctcccattccggcattctgtagcagtaaaaggggtattcggcttttttccgtctgtattcttcttcaagtaaagtctgccgctcagtcataacgcatctccgtatatgtttccggattactgctcaacgatagcgtcaaccgttctcttaatggatttgctcagtgatttctgtcgttttgcgatttcggacgaaaggtcgggcttgttgtttatgaacatcggcttgaacattccgtcgcgcaggtcattgcaccaccacgtgtctccgaggtcatactgacggacgctgaatatcaagtcaagcatcgccagagattcggagtcgcgtgagcttttacgtttcagcgctacctcatagtattccggtatgacattattataaccgtatgacgccatagattcaagcagtgcgcccgcatattccggatttttgtttgttatcggaacaatagctatcttgcatccgccctcaactctgctgtagtagccgttctgctcttcgttatacttcgggaacggtataattccgaaatctgtttcgatatcacggaattctctaaggtagtaaaatgtctgtccggcaaaaagcgctctgtcagcggaaaactgctgtgtaacatttgtgccaaagttgctgtcctcgcttgtcgggtaccatattccgccgtcccacatcatctggaacacattttcaactacgccgaagaatctctcgtttccgtcaatgttgaggtacggcaggtcgtccttgtccttcgctatgctcttctctcctgccgccatccagaagttcgggagaacctgttttggcgaactgacaaatccgtatgaatcgtcaaccgtcattgttccgtctccgtccacatccgcagtagtcgcctgagccatcttgtaaaaagcgtctaaggtccattttccgttctccacaagctcatacgggttatcgagcgaataattctgcaccaaagtcttgttgaaggtgagaatatgcgtaaggtcgtagtacgacagatcatatgcaccgaacgcgaaatacgtcttgttgttgaacgtaacgcacttgtttaagctgtcgtcccagtaaggctttgtgaggtcaatgtactccagctcgtcgcatggaattaccatcttgtccttgatatagttcggcgcgtacaaatcaagcacaaaacagatatcaaaggaatcgtcgtcgcccttcacgaggttgctcacatatgtcgtgctgaaaacgtcggaggtgtaagtctcgataatcgaagtctcaaacctctcttcaatggcgtttttcatgttgtactgcgcgtcgtttactctttcgccggttatttcttccgcgataatgttctgtgttgcccacgacatctccggcataagcagattcatatccttgccgaagctcaactcaggcacgttgtcggcggtgttttcggtatcgctctccgcttcaacagtctcggtatttgtctgcaccgtcgaagcatcagattcgggagaaattttatcgctgccggtttcagacgccgcacatgagccgagtaataaaacaaaagctgacaaaaggcagatgtatctttttttcataatctcaaattatcctttcttataagttgctcacgccggagaatatgtcgttattttgtgagatatgctcccgttatcttaaggttcacgtatgttccggagtattccacgcccgcaagtcctatctggtcgataatgtcgcccgatttgaatccatcaaacgaaaggaatgcttccgtcggaacgtagaacacgccgctctcaccgtacacattcatcggagcaaaagatgacgcgtgatacgtcattccctcgggtccccagccgaaccagtcttcgcagagtacctcggattttgttccgtcgtcatgcacaaacttgcacatcaacgcaatttccgagtcctcgtcacagtcgtcacaggtgtaggtgaaggcaaaatacttgtactccttcagcatgtcttctgttatcgcgtcgttcatctgcgtgttgtcgtcgccgagaatccactgaccgccgttttcctgtagtagaaattcggaaacaagaatgtcgcccgacaagtccaaagctccgtcgaatacgcacggaacatccccctgtgcaggcagtccgttatcatccgcggaaggctcggtctcggcttttgtctctccctcgggcgcggttgtctcaggagcttctgactcgtgagcttcggtttcaggtgtcgccgcgggttctgtctcagcgttctccgagctttccgtattgcttgttccctcgggatatgtttcggtgttctttgcggtttcagcttctccgccgccgcatgaagtcaaggctaaagctgcaatgagtgcggttatgacagtctttgataagttgttaaagtttttcatttttaatgtcctcgttttatagattttttgttttttcatataccgagcgttttctgcttcaaatatccgtgtctgctcatttatattttaactgttcgacactgataaaatctataagtaaagcacacaaaaataacactatcctgcactcaattaaaatccgcgtggaaaaaaagcccgaatataccgcacaaacgcactttcgtaggcagaatagtgtaaaaagcgattatattgctgtaaggctcttgatgtggttatatgcatcaaactttgtgagctgttcgtttacctgagctgtcgatacgccgggcatacctgacgctattttcttcgctactgcggcttttgctgtcggagaaacggcttttgcttttcctccgagcggtgcggttgagacaagctgcctttcgagatatgccgctctttctgcttcgcggactttcttcttttcctctgccgtcattagctctttggaataacgtatgtctgtcgaagaattagaagaattttctgcatcggtattgacatttgaatttgtttgtggtacacttgaatcaacagagaattcctgtctcgtttgaacggtactatccgtaacataacgtccggagttctctgttatttttgtcggggtaatgttgacaatatcatagagttctgcactttgatttcttcttataccgacaagtatatcagcaatatatccattgtctccgactttgaatctgacctctccgcgggcgaagttgtcaaattttttcttgtgaaccgcttcttcgttaatatacgacttagcgacctcaataagttcatttgcattttggaatgactgcattttatcattgaaagcggcttggttactgcgatacaatgactttgcgtcttttgagtacacccattctttaacgcctcgttcgtttgacagacctatgttttgtccgttgatttccatgtcatagaatcctttagattccgcgatttgctttaaggcttttacgatatcttttgggttcttttcatctatggttgtgtcgtccactttaacgaattcttttccgtcgatgtcaagttgcttagagtagcgtatgtcgcctttgcctttgtcgaatgtgcctatgttgtctgttgcggatttgatttgttcgggtgtgaatgctacgtaatagtccgtgttgtcagtgttatatgcaatgccgtcgtagcctgttgaatccttgagcatttcgaggtatgcttccgtcacgtctttgtttccggcggcaataccgttgaggaagcctttgattaattcagcgtcgtttgaaccgtagtcgaaatcggtaagctcatactctttgttgatgtcgttgcctttccattcgccgtcaatgtattcgtcacggtgctctattgcgaagtcaaggaatttctcccagtctttacgggatatctccattacttccgcgcttgcaggcttcttgatgtcgaggtatgcttcaacaactctgtcgccgtatctttcggcagaggacttgttatcgacaaagtaatatcccacgccgagcttttctccgttctttccgcgatttgcaagagagaatgtccaaaagtcggcgtttgttccgtgatatacaactttaggtgagccgtctgtgtttacaactttgcttgaagtttcgggatgtgtctcccagtttccgaaccaacgcttgaattgttgcgtttttgttacattttcgatttttatattgacaggcgagccggaatcgcgtatactatggacgtagccatctactaagctcataaccctggggaattgtaccccagacgacctgaggcactggatggctttatttttatccaaatagtatactgacacatcaccatttgattcttttgccagtgctttgttaagcatgtttgctgcgttttggcgtgtgtgaagcgtagtaatcgcattgctgtctatgttttcgccgtttaacttacctgttccgtcaatttcgactgccgcaaacataggcttgttattgtaagacaaatcgagaattgcgactacgcttgaatccggtcttgtgcttgaagcaaatattgccacgggagattcaagagctttcggtatctgctttaggtttgcttcaccgaaatcatggtcttgcacattgcctttcagaatatcggatagatgtccggttccgtatgtcataggcagaggattcagccctatcttagtgaaaacctccggcgttttgccgacaacaagagtatcatatttcgggatgattccgtttttatagtcttcgatttgttctgagaaggacttggagtagtcgtatttatcaaggtttttggaatacctaactgcattttcgggtgacagttcccatgcggctttaggcagattttctttggggtctgtcgctgttattagttttccttttctatcaacgctgttaaaatactgctcgatttcagaaacgtaatcggcggtttttttgttgttctgccaacctgaagatgtctctttgcctgtgccgcttccgtctccttcatataccataaaataggcagttccgtcttgtttgatggattttgcggtttcgaggataacatttgctcttgcgtctgcttctttgataacgttgaggacgtttgcacaggtagctgtatcggctctgttgccatcgcgaagataatcaagagttgctttatttacctcttcgcttctgttgtacgggtcaaacaacatgttttttgtgccattttcgcgcaggaaatctgtggcaaggtcaaagcgaccgccgcctatgtcgatgttggtttctccgaacttaacattcggattcctgaaaagtgcgggtacttgtttgattgaggttttccatgaggatatcgactgcgcaacgggtgtgttgttttctgtgtcaagctgcttcgagaatcttacgtcggatagcgtgttcagaactttcagcctgtccgcttcgttgccgttttcgtatgttttggtttctatagcaacaaaaaagctcccgtcttttgaacgagagctatggagacaactggaatcgaaccagtgaccccttgcatgtcaagcaagtactctaaccagctgagctatgcctccgaggtgaggatattataccatatctccgcgcggattgcaatagtttttcaaatttttcatgtgatttttgttcgtcgatatgctcaatatgacgccgcttttttcgtatgatacgtgcatgaaaaactccgctttatctgatataatctgatgtaacagctgtatcacgaacgcaaatatcggtacggcgcaaagaaagggttaaaaatgaacagaaagctgaaaatcggcgtgttcggcggtgcgagaggaaacaccatgattcaaaatctcctgcaccatcccgacgctgagctgaccgcggtatgtgacaaatacgagccgcttctcagacaagccgaaaaaagtgcgcaagaggcgggacttcatatcaagtgcttccgcgactttgacgaatttttgaagtgcgacatggacgccgtagtcctcgcaaactacgcaacggagcacggaacctacgccatccgctgtctcaacgcaggaaagcacgtgctgagcgaagtcctccccagtgagactatggcgcaggcggtggagcttatcgaaacggtggagaaaaccggacttgtctacgcatacgccgaaaactactgctacatggacgtgacattcgatatgtggcggcagtataaggaaggcgcgattggagacgtgacctatgccgaatgcgagtacatccacgactgctccggagcatggatcggcttgacctacggagacacctcgcactggcgcaaccacctctgccctaccttctactgcacgcactccctcggacctatcatgatgataacgggtcgtcgtccggtgcaggtcgttggttttgaaaatccgccgattgaggaattttacaagctcggacacgccggaggacacgcaagcggcatagaaatggtaactcttgacaacggagctatcgtcaaaagcatccacggtccgctgaagctcgagccgccgcacacaaaatacgaggtgtacgcgacaaagggctacataggcactgttgacggcggaacgctcagactgtacaaggaaactcccggcaaaatggctgaggggaacaacgaatactaccaccccgagaagttcgtttcagccgagcttgcgaaaaacagcggacttgccacacacggcggaagcgatttctaccccacgcatttcttcatacagaagattctcggaagagacgagggaaagtggtccatcgacgtgtatcaggctgtcgacatgggaatctgcggaatcctcgcgcaccgctccatcctcggcggaaatgttcccgtgaagatacccaacctgcgcgaccctgccgaaagagataagtggagacacgacaacgcctgcacgaatcccgaggttgccggagacgctgtcctgccctgctcatcctatcccgagcgcgccctgactcccgagcaagccgaaaaaaaccgcagaatctgggaagagtcgcagaaataacgacgcttatatagcaaaacagtcccgcagtttttcctgtagggctgtttttgtgtggttcgaatgaagctctttactcttttagaagcaaaatggacagtccctctcggaattgcccacttcttacattaattatgcgatttttccgtctttaacagcatagcacacaattacaacaaacaagcttccattttaagtcttgaaacttccattccatttgacatcgtttccaccagcgattctacaatccggaaaccacacttcttgtagcatccttgtgctttatcgttgtcgctgtctgtatacagaacaatcctctcatatcctctgtgcttcaagcggctcatcaactcaagaattgcaaaagatccaaatccgtgtccttgataatcgggaagaaatactgccatttttaagtatgctgttttgtcctcgcctagaatcccatttactccaagccagcctattggggtatttccatcaaagacgatatagtcttcctcatcatcgtcatgagcccattcgttgatagcgtctatccagtcttgctgctctgttggaacttcgtttaatctttgtaacacggaaggacaattcatcaacaaatgcagaaattttgcatcattattacaaactgacttgatttgagcatccttataattatgttccatgcaaattaatgtctccttgtctctgacacatggcgtaagcaccaacattttagggtcaatcaatagagctttgcgcctgccggaatgtgaggatcgaccatcagcaaatgcaacttttcttcaccgttttcgtgatgcacggcagagatcaacataccgcaggagtcgatacccatcatcgctcttggaggcagattggtgattgcaatgcaggtcttaccaaccagttcttccggctcataatattcgtgaattccactcaaaatgaccctatctacgccggttccgtcgtccaaaacgaactttaagagctttttggacttcttcacggct

SEQ ID NO: 4569 - DNA, 2334 bp, Unknown
  16S sequences of unknown bacteria
tttgataaagtttcatttgatgcgcctgttttttgtcagtgttaataagaaggttataccgatttgaagtgcgcttattaagaaaacgccagatccaggggcgtatcatctctgcatctggcgttttcttatagatttgtacttgcctgtttatccaatatacgggaatattaaagcagcttcacaccctttcgggaaaacattagtaagtttgaaagtgccgttatgagctatggcgacttgttggacaatcagaaatccaagcccatgtcttaaatcaagccgctcatctgtgctttccatataatgcggtttttcttccagctcttgcagcttttcagcagacagacccgttccgttatccgtaaccgccaagataagatagttttgcgatgttgtaagcgaaaggcagacttcacagccctgtgggttgtgttttatgctgttctggacaaggttgtttacagctcgcgaaatcaatctggcatcacattccaacacagcattttcggcgtcaggagtgatcttgattccgatgttgtagctatcggaaattcctgtattcaacaggtctactacataggatcgcagtagtttggataagcgaaccatctctttatgaagcggctgcatctcatattccaactgcgatactaaattcaaatcctgcaccagctctttgatttttacactttgcttccgtactatttccgcctgttcacggatgctcttgctggcagctttactttctgcaatacggcccgcataccccataatcatggagagaggtgtgcggatgtcatgagagaccccgctgatccagttggctctggcttcgttttgcctgcttaatatcagagaggctttatttacgctgttcgcaatttcggataactctctatcaatatggagagaaacgggtttgccatcggccaatgtttcaatggcatctacaatcggttccgtgttctggatgatcctgcgttttgaaaaatagtaggccaaaaacaggcacagcacatccatgcccaacattcctatcacatagaggggaattttctgaatagtctccatggaatagtagttgctggtgagcttcatatagctattctttggataccctaaaactaacaatccatcctctgtactccagacaaaaacaggataatcctccagatagcctttggaaaataaagctacctcttgaatgctgtaatgttgcggcacttcttgtggcacatcgagccgccagaagcattcgcccgttgacgttagatacatggcccagatattgtactggcgcaatttctgctctgcgtaatcgggcaaaccttctgtggtagccgcagtagaggtcagctcaagcatggcgcgcggggacgcttctccgtaatcctctgaaactgtgtgatagaaagtcacgccatacagaacgacattgacaattaccaggatcaaaagaaatgcagcgaaagacgccaagtgctttgaaatataggttccaaaagatttcatggcgtcacttccttgtaatcagtttataacccagccccttgatcgtaatcagggaaacgggctttgagggatcggcttcaattttttcccgaatccgccgtacatgggcattcaggctattttcatagccgaaaggattgtcgccccataatgcttcacaaagagcgtcaaccgtaacgatctttccctcgttgcgggccagcgtttccagcagggtatgctcttttgcggtcagggggataatctcgccgcccttgttgacctctgcccggctaaaatcaatcgtacatccatccaggaaaacccgcgggctgtcctctttataagttcggcgcaaaaccgcatagacacgcagtaatagctcctgcggcataaacggctttgaaatataatcgtctgctccaaggccaagaccggccaacttgtctgctgcttcgtcttttgcggtcagaaagatgattggcacatttgtaaaagtgcggagctgcttcatcagggaaaagccgtccccatctggcagcatgacatccaaaaccatcaagtcgggtttttctttttctgccgttattatagcctcttttaccgttgcggcagtaagtaccgtttcaaaaccagcatcgcttaaaatatcggataccattttcagcaaatctggctcatcgtctacaagcaagagcttcttccgatgcagaaaagagttgtccatagcgtcacctcccgaaagtattataacataggatttcaagtctgcggagggcatcctcaaaaagtaaggtaaaagtaaggacgggagaatgtagatgtcaggttgaagttgta

SEQ ID NO: 4570 - DNA, 32759 bp, Unknown
  16S sequences of unknown bacteria
tatttctattttataccgtctcggaggtttacacaatatctaaagaagtctcattcatcgaccttgctccgaagaacgatcttcgcacgcagacaaaagcggcatggggatcaaatatcttttggctgctaatctctcttatcggatttggggcgggaggcgcagcttttgcatacggaattataataatatgcttagggctgtttgcctcggttttttttcagataaagcgaaaagataaaaccgtttacggaggagtgtttctgtcgagctttctttcactgttgtttgttataaatttcactttgacggcggaaattttttgtgagcttgcggcgtttccgattgcattaaaggctgtagctgcggcggtacctgccgtaacggcgcttgtgttcaccttcgttattgacagacgtgttaaaaccggtgcaatcaaagacagtaagggaacagggaaaagcaataaagcggcgaactacgcagtgtggggagcgttaggaatatcgtttgccaggctgtttatcgcaaaactcaaaatggcgaatgtagtgtggatcgttgcggttatccttcttattgttatggcatccctttgcagtttgggtacggcaggcttcctaaaggtttattacataaataaatataatctcgaaaagtacaaagactacgtcggtcgtcacagcgtcggatgatttgaatcctgcccgtagcggacgcgctcgatatctttgcggtgccgaggcaaaacacttgaagttgttttaccgcggcgtttttatattttgaggcgtatctttatcgattcttcgagcctttattctcgcggaatgcattgggtttaccgtttcggcggcgattaggattattttcacctgaaaacagatttttacgaaaaaatatctttgactcgtcaacatgataattttttatacatttccgataaaaaagtctattttctttttttcaattgtgcaatataataataacaacgacaggaaaggtcgtaaaaatacagggaggtaaactcaaaatgaaaaaatttcttgcaatagcactggcgctcgtgttcgttttaggtctggctgcctgcagcgacagcaaaacacccgaaggcggagacagcacggagaaaggtgaagtttccgtattctattacacctacagtgatacatatatttcgagcgtccgctcggcaatggacaagctccttaccgacgccggaataaagtatcagaactacgacgcaaacaacaatcagacgacccagaccgagcaggtcacaacggcaatcgccaagaattcgtcccttcttatagtcaacgtagttgacaccggatcgaacgatgcggcgcagaacatcattgatcttgcaaaagcaaagaacattcccgttatcttctttaaccgttcggttgaggagtcggtagtaagcagctacgacaagtgcgtattcgtaggaaccgattacgagatggcaggacatatgcagggcgagatggtcggtaattacgttgcggagcattttgcaaatcttgatctgaacggcgacggcaagatcagctacgttatgttcaagggtcaggaaggcaacatggaagctatcgcacgcaccaaatacggtgttcttgatgctaatgccgttctcaccaaggcaggaaagagcgagcttgttttctacgattcggcaaactccaacaactacctcgtagaccaaaacggtcagtggtcgtccgcggctgcaacggattatatgtccacgatccttgcacagtacagcgaagccaacaataacatggtagagcttgtcatcgctaacaacgacgaaatggcgctcggtgcgatctcggctcttcaggcagcgggatacaataaggaaggcggaaaggttattccggtattcggagttgacgctaccgatgccgcaaaagaagcgatcaagagcggaagcatgatcggtaccattaagcaggatgcagacggaatggcaaaagttatcactaccattactcagaatttcctcaactccaaatcggtatttgaaggtgtcaatgccgacgacgtagtcggaacttggagagtaaacattccttacgcagcatacatgggctgatataactgatgatacggtggggcagcggatgttccgctgccccattgaaaaataacttcatttcggaaagacgggggagcctctatgaaagaaaataaagtcgcagagcagctcactgcggataataaaaacacatcggtgcttctcgaaatgcaggatatcgaaaaagcatttccgggagtaaaagcacttgataaggtaaatcttacggttaaagccggtaccgtccatgcccttatgggagaaaacggcgcgggaaagtctacgctcatgaaatgtcttttcggagtttatacaaaggacgccggcaagatatttctcgaaggacgggagatcaacttcaaaaattcaaaggaagcactcgaaaacggcgttgcgatggtgcatcaggagctcaatcaggcactgaagcgcaacgtcatggacaatatgtggctcggccgttttcctactgttgcaaaggggcttccgatcacaagcgaaagaaagatgtacgatgcgacaaagcagattttcgataaactcgggatcaatgtcgacccgagaaccgtgatgagtaaaatgcctgtgtcgcagaggcagatggtcgaaattgcgaaagcggtttcttataatgctaaggttatagttttcgatgagcctacgtcgtccctgaccgaggatgaggtggcgcatctcttcagaataataaatatgctgcgcgatcagggctgcgctatagtatacatttcccataagatgaaggagatcctcgagatatccgatgaggtcacgataatgcgcgacggaaaatggatagccacaagggaatcgaaggatcttacgacaaacgagatcataaagcttatggtcggacgcgagctgaccaacctttatcctccaaaatcaaatgtgccgggcgacgtgctgcttgaggtcgacgaccttagcgcggagtactccaaactcagagacgtatccttcaaagcacatcgcggagagataatcggtgtcgcgggacttgacggctccgggcgcacagagcttcttgaaaatattttcggtacggcgacacgaaggagcggcacgctgacgcttgacggaaagcgtataaagaacagaagtgcaagggaatcgataaaaaacggttttgcacttctcaccgaggaaagacgcgcgacgggaattttcggtattctgaatatccgcgacaacgcaacgatttcgagcctcggaaagtgcagtagcggaccgtttctcagtaaaaagaaaatgaaaaaaagcaccgattggtgcataaaggcgatgaacgtaaagactccgaatcaggagactaaaatacgttctctctccggcggaaatcaacagaaggtcattctcgggcgttggctgctcaccgatccgacggtgctgcttctcgacgaacccacgagaggaatagacgtcggggcaaaatatgagatatatcagcttatcattgaccttgccgcaaggggcaaaacagtcataatggtttcgtcggagatgccggaacttctcggtgtgtgcgaccggatacttgtaatgtccggaggacggcttgccggtgaagtcgatgcgaaaacggcgacccaggaagacattatgacacttgcagcgcaatatgcgtgaacggaggaaaaaactaaaatgtctgctgaaacttcaacaaaaagaaaaaatcgcctgtcggtttggatcgatgatttcaaagccaaatctccggcagaccgtcggcgagtcatcacggatatgcttttcaacaatgccatgtacatgatcatattaatagcgatcgtgtacatagcaattcgcgttcccgcattcctgtcacgctcgtcgatcatcaacatcatctcgcttaccgcggcaaagcttccgatcgcgctcggcataggcggtgcgatagtgcttaccggaaccgatatatcggcgggacgctgcgtcggacttacggcatgcatcgcggcatcgctgcttcagatgacgacatacggcaagaagatattcccgaatatcggggtaatgcccttgtggctcgtgcttctctgcgttattgcagtcggagcgcttatcggattcgtaaacggattctttgttgcgaagttcaagcttcatccgtttatagttaccctctcgacacagcttatcgtgttcggcgtcgtgctgatgtaccttatgctcggcggaaacaacggacagaccttgtccggacttgatccgtcttatacagactttgtgcgcggaactctgtttacggtcggcggagatgccgttccgaaatatgttctgtatgcggtgattcttaccgcgatcatgtgggtaatatggaataagaccaagttcggcaagaatatgtttgcggtcggttcaaatgaagaggctgcgaatgtctccggcgtaaatgttttctggactatcgttctggtctttgtgctggcgggagcaatgtacggaatcaccggattcattgagggtgcaagaatcgcatcgtgctccgctaataccggactgaactatgagtccgacgctatagcagcgtgcgttatcggtggcgtgtcctttgtaggcggtaccggaaagataagcggtattgtggtcggagtatttctccttcagatcatatttgtcggactcaacttcctttccgtagatgcaaatatgctttatgtcataaagggtcttataatactcgttgcgtgcgcgattgatatgcgtaagtatctcgcccgcaaataaattccaagcggaggtaaaacgttatgaacgattcggaaaacagagaagtgcagacttcggatgcgaaaccgaacggcgggctttattcaaaaatcaatatgtccgtccgcacggcgaatatccttgtcgcagtcgtacttgttctgcttgtcggcgcgggcgtgttcgtgataagacataacggttttaccgtcagctttgaaaccgacggcggttccgccgtcgaaaacgtaaaggtcatgcattccgagcttatcgtacagaacgcggttcccatgaaggaagggtgggtatttaccgggtggtactcagatcccgcctgcactcagaaatgggatctcgaaaaagatacagtgacgggaagcatgacactgtatgccggatggcagaaaaaagaatagtttacgttggctcccccggaccgccgcagaaaatgaaatacacataccaatgtggaatttgttttgtgcggcggtcgttttttcgaaaaaaacgtgccctcgttgattttcccgccgttaggtgatataatataaaggtaagtttatatttttgttttcggagggaattcgcatgaactataccgttctcgtggttgaggatgagcatgatcagcggcgagctcttatagaaagagtaaaatggaacgatgcgggatttgaagtcatcggggaagcggaaaacggtgttgaagcgatcgaccttgtcgaaactctcgagcccgacctgattatcaccgacataaaaatgccgatgatatccgggcttgaaatggcggctaaggtgcgtgagctcagacctgccacgcagatcgttatcctgagcggctatgacagctttgaatatgcgcgcacggcgatagattataacattatcagctatcttctgaagcccatttcttcttccgaaatgtcagaggagctttttgagataaggcgacggatggacgaaaagctcggaagcgttctctccgcctccgacagcaacgtacagcagcagcttcgccgcctgtcggtaaacgaattccttcttccgcttatgctcggaagcaacgagctcagacaggacgaccgcgcgcttcttgagcaggcgcgttctctcgggattgtgggacagaactgcgaaaacgcacgcttttgcattcttgtttccaaattcaaaaacggtgacgggatttcgtgtacggatgataagcatacggatttcattaataatataatttcaaaatatgcacatgcggaaagctttgtggtctatcagcgtgcggtaacgcttgtcgtgattgacggagagggagagctttcgaatctgcttgagcttccgctgagggaaatcgtgcagactgcgagaagaatgctctcgcagaaatgcacgatcggtgtcagccgtgagttttcgcttctttcgaattgctctgacgcttattttcaggcggttacggcaaggcgctatacctccgacggagcgggcgaggtccgatttataaacgaccaggagcataacgaggagttcgagaccgagcatgcggagaagaccgtggtgcagctcgaacagcttctcaaggtgggaagcgaagaatcgcttgtcggatttataaacgatctttacgaaaagagcacgcccgaaaatgcaaatctgctcatgtttcagataatcgccacggtttgccgggtcgtcggttccgtgtcggacggaacggatacaatgaagcttttggcgtcgaattccatcttttcgcgtataacgtcatacagcagcgagaccgtaatgaaaaacgagatgatggatttctgcggaaaggcaaaatcgctgatctctcagtcgcgcaaaagggattcggaggttctttgcgaccgcgtgatgcagataatcgatgaaaactattcggacgagaatctgtcgcttaccggagtcagcaataccttggcggtcagtccgaattatctcagcgcgcttataaagaaaacaaaaaagaaaaactttataacccttcttacggaacgcagaatgaaagcggcatacgatatgcttgtctgcacgggaatgaagattctcgaggttgccgaaaagtgcgggtacagcgatcagcattatttcagttattgctttaagaagttttacggcgaatctccgaataaggtgagaaacgataaccgcacggacggagaatgacatatgcgccgccgggagcggcgaaatgacgtacaggtgaaaggaggtggaaaaatggggcataaacgaaaacggttttcgctgagtctttcggctcttacggttatctgcgttaccgtggcgtctcttgctgcggtatcctcgtgcatagccatattcgcatcggtttacagccgttctcttatgcgtgatgcaaaagtgaattcggagcagaccgtacagcagacggcgatcgcggtgaacaacaatctcgaagctatgaaaaacaagcttactgcggtcagaaatattctgtatgaaagcaaggatccggatgattttcgctccaaaacggatgcccttacgaagatacagaacgatatttttgcggtcatggtgtacgattccgaagggaatatactgagctgcaccggaagcggaaataccctgaaaaaagaaatatacaaggatctttcgtttgacaaagctctgtttgagggagccgccgactttgcgctgtccgagcctcatgtgcagactctgtttgacggcgtttatccgtgggtggttactcttgcgctcagaaccgaccgtcaggtgttcggcaacggagcgtatgtggcgatagatttcagcttttcggaaatagcaaaatatatcgataaggtcggcgtcggcagacacggatactgctatataacggacgcggaaggaaatatcatataccatccgcagcagcagcttatattttcgcatttgaagagcgaggatgcggggattgtttcgtctctttcagacggagttcatgaagacgaaaacgtcatatataccctgagcacgacatacgacagatcatggcgtatagtcggtgtcagctatacggatgaacttgttacggaaagacagtcacagatatttatgagtattgtcgtgtcgcttctttgctgcgcggcggtttcggtcgcggtgcttgcggtatatgccattatcgtaaatgctcccgtgcgctcacttataaaggcgatgaaggcatttgaaaatgcggcggacagcttcagctattcgagcgggaacgaagccgtaaccgagcttcaggtgctttcggattcctttgaacatatgtcaaaccgtataaaacaacttatggaacgtgttcgcacggaggaaaccgagctgcgcaagaccgagcttaaggcgcttcaggcgcagatcaatcctcattttctgtacaatacgcttgattccattcagtggatgtgtgagcagggaaagaacgaagacgcgatgaaaatggtcagtgctcttgcaaaactgtttcgcataagcataagccgcgggcatgaacttatcccaattaaagatgaacttcagcatgcaaagaattaccttgtaatacaaagctaccgttatcgaaatcagttttcatacagttttgatattgaaacacggcttgaacactatctgtgcaataagataaccgtacagccgcttatcgagaatgcgatataccacggtatcgaccgcatggttgacgagggcgagataaagatatccgttaaagaagctccggataataaagacgatatcctgataacagttgaagataatggggtcggtatgaccgaggaacagtgccgcaaaatactgcgcaaggagcgcagcgattcaagcggaatcggcgttaagaacgtaaacgacagattgaagatatacttcggcgagaagtacggcttgacgataaaaagcgagcttgacgtcggcacgatagttaccgtaagaataccgaaaatagaagcggaggcggaaaatgaaaattaaaagatttcttgcgcagcttctttccgccgtcctttgcatgactctggcaggatgttacggaaacgaatcggacgcgaaaaaaaatattgccgttatcgtaaaagcggtcgattccgatttttggcacagtgtgaagaacggggtaaattccgccgcaatcgagtacaatgtttcggtaagctttgaaggacctgaaaacgaggaggattataaggcacagaatgatatgataaagaaagccgtttccgacggagcggatgtcattcttttgtccgcgatagattatgtaaaatccaatgatgcggttgaatacgccgtaaacagcggagtcaaggtcattaccatagacagcagtatagaatccgaaaacgtaagtctgtttataggcaccgacaatgtcggcgcgggaaaagcggcgggagaagccgcggtgagcggattttcgtcggatgaaaagatatacatcgggcttgtcaactacaatgcggatacggacaacggacgtcagcgtgagacgggattcagagaatatataaagaatgtcgaaaatgcgcagataattactatggttacagcagacagcaacgcggaaagcgcaacggcggcggcagcctcgcttatcaagggatatcccgagataaatgtcctcgtcggattcaatgagtggatgacgctcggggtcggaaatgcgataaagcagctcggcgtaaaggataccgtgcgcggaataggctttgacagcaacgttatttcggtcggaatgatagaaacgggcgaaatggacacgcttattgtgcagaacccgtttgcaataggatatctcggcgttaaaaatgcggctgttcttgcttccggaggaagcatcagcgaaaagacgatttatacagccgttacgccggtcaataaagagaacttatttgatgaggatgttcagaagattattttcagattcagttgattacggaggtaaaaataaaatgtatgttccggacagacacagatacgaaaatatgatttacaacagatgcggcgagagcggtttgaagcttcccgcaatatcgctcggactttggcataatttcggagacacgtccccgtatgcgaatatgaaggagctttgctttactgcgttcgataacgggataactcactttgaccttgccaacaactacggtcccgagcccggaagtgccgaaattaatttcggacgtattcttcgggaagaactgatgccgtaccgtgacgagctcataataagtacaaaagcgggttatacgatgtgggaaggtccgtacggggattggggaagcaaaaagtatcttaccgcaagccttgacgcaagcctcaaaagaatgggacttgattatgtggatattttctaccatcaccgtcccgaccccgaaactccgcttgacgaaacgatgggcgctcttgctcaggcggtaagaagcggaaaagcactctacgtcggactttcaaattacgacggtgagctgatgaagcgcgcatacgagattcttaccgatctgcattgtccgtttgtgatcaatcagaaccgttattctatattcgaccgaacgatcgaaaataacggactgaagagggaatcggtgaatcttcgccgcggaataattgcattcagtccgcttgcgcaggggatgctgaccgacagatatctgaacgggattcccgaggacagccgtatcaaaaaggacggcagattcctgaaggaaagcgcgctgaccgaggataaacttgaaagtatacgaggacttgccgccgttgcaaaggcacgcggacaaacgcttgcggagatggcgcttgcgtggatactgcgcgacggagcggtgacctcggttctgatcggagcgtcaaagccgtcacagatcaccgaaaatataaaggcgatcgaaaatacgcatttttctgcggaagagcttcgctctatcgacgctttgtcgcggtgagaacactcggcattgagaaaatgccttgttacgcataatatatcgctaagcgtaaccgatgcacggatttcggcggtgtcggttacgctttttttacgaaaaaacggaatgaattgtctttacttagcggacgaaatatagtataatatctgagatagatataaaatggggtagtgtaatgattattcttggaatcgatcccggaattgccatagtcggatggggtgtgatccgttttgaaaattcaaaagcgaccgcgcttgattacggctcagttatgaccggaccggagttttccgttgaggaacggcttgagattatctacgatagactcgattcgataataaaaaaataccgtcccgacgcagtatctgtagaggagcttttttggaacacaaaccagaaaaccggtataattgtggcggaagcacgcggaacgatacttctttgcgcccggaaaaacgggatagaaatatttgagtatactcctcttcaggtaaagcagtccgtcaccggttacggaagagcggagaagaagcagataatctctcttgtaacgatgatgctcgggcttgatgctcctccgaagcctgacgatactgctgatgcacttgcgcttgcgctctgccatgcgcactgttcgtcctcccgtgtcggaaagtatttcaacgcatcggcaaacgcggggctcggacggcgtaagtatgaggatgaacgttatatcggcgcgacaaatatagttgtgcgcgggaaaaccgtttttttcgatccgaaaaaaaagaaatccgaaaagtgagaacaatattatgtggatatcagataattggcaggattatgagctgctcgacgcttccgacggcgaaaggctcgagaggtggggaaagtatattcttatccgccccgatccgcagataatatggaagaataaaagaaccgccgcggagtggaagagggctgacggaatttacagaagatcaaaatcgggaggcggggagtggactgtacgcaatatgcccgagaattggaccgtatcatacggagatctgaatttcatgcttcgcccgatgggctttaagcataccggactttttcccgagcaggctgtaaattgggattggttttccggaatcatacgctccgccgtatcaaagaatcccgaaaagcgtccgcgtgtgcttaatatgtttgcgtatacgggcggcgcaacggcttccgcagccgccgcgggcgcggaggtatgccatgtcgatgcttcgcgcggaatggtaaatgccgcaaaggaaaaccttcgcctttccggactcggagacgcgcccgtgagatatatcgttgacgactgcaaaaaatttgccgagcgagaaaagcgaagaggcaaaacctacgacggcataattatggatcctccttcatacggaagaggacctaacggagaactgtggaagcttgaagacagcgcggacgaacttatatctcttgcagcatcgcttttgtctgaaaagccgctcttctttcttatcaattcgtataccacggggctttctccggcatcgatgggatatatgctcgtttcgtcgctttctcccgaattgaaaaagaaagccgcagtggaaaccggggaaatcggacttcccgtaaaggcatcggggatgccgctgcccgccggagcgtccgcaagatgcacattttaggcgaagcggtaataaagcagctgcctaaaaagcgccatttcgacaaatgtattgacggagatagtcaaatgaataaaataataaaggccgatcgaatttcgttttcttatcctccggaggaaagcggaaaggctccgagaagagtaataaaggatttatctttggaaattgccgaaggtgaatttgtcgcaatcctcggacataacggatcgggaaaatccacgcttgccaaactgatgtgtatgcttctcgagcccgacagcggcgagcttgagatatgcggaatgaggatgaccggagacggcgttaccgaagaagacttttacgaagcacggcgtaatgtcggaatggtttttcagaatcccgataatcagatcgtggcaaccatagtggaagaggatgtcgcgttcggtccggaaaacctcggaatgccgagcgatgagatacgaaagcgggttgacagcgcgcttgccaccgtcggtatgagcgagtacgcgagacacgccacgcagcgtttgtccggaggtcagaagcagaggatcgcgatcgccggaaccatagcgatggacagaaagtgtatcattttcgacgaaagcacggcgatgctcgacccttcgggacgctgtgaggtaatggacaccatacgtcatctgaataaagtaaaaggaataaccgtagtccatataacccattacatgaatgaagccgtagaggcggatcgtgttgttgtcatgaatgacggcgggatcatgatgtcgggaactcccgcgcaggtgttctcaagagtcggcgagcttagatcggtcgggctcggaataccgcagacggcagagcttcttcatatgatgcgagaagcaggatacgatgtcagaaccgatattttcggcgttgaggaatgcgccgacgaaattgcccgtgtgcttgcgaggtagattgcatcttcgcgcaagaggcaataatcaaggataattcggaaaggcaagactaaatgtctcagatagagcttgaaaatgtgtcgtttacctacggaggcgatacatcatacgaaaaaaaggcgctcgacggtgtgtcggtaacgttccggtcggggataatcaccggactgattggacatacgggctccggaaaatcaacgcttgtgcagcttcttaacgggcttctcaagcctcagagcggcagagtcctgctcgacggaaaagatatatgggcggacccgaagaaaataagaaacgtccgcttcaaggtcgggcttgtaatgcagtatcctgaatatcagcttttcgatgaaaccgtgagagcggatatcgcattcggaccgcgcaacatgggaatgacacccgaagaaacggaagctgccgttgaggaagctgcgcgctttaccggacttgaccgctcacttctcgataaatccccgtttgatctttccggcggacagaaaaggcgcgcagcgcttgcgggcgttatcgctatgcatcccggagtgcttgtgcttgacgagccggcagcagggcttgatcccggcggacggcgtgagattctcggacggatacgcgaattctgcgattcttcgggaacgacggttataatcgtcagtcacagcatggaggacatggcaatgtactgcgactgcgtcacggtcatgtccgacggtcgtattgcgttttcgggaactccggcacaggtgttttcaagatcggaggagcttttttcgctcggtcttgacgttccgcagataaccagagttgcggcggcgcttgagcggcgcggaatcgatatcggacgcgatatttacacggttaaattcgcctttggaaggatctgcgaatatatagacggactgaacggaggaagcaaagatgaatattgatgttgccttcggtcagtattttgaagggaattccgtcattcaccgtcttgatccgagattcaagcttgttataaccatccttttcatcgtcgttatatttcttgcggaaaacgtcttctcgtttttgcttctcaccgcggcgctcataggtcttatacttcttacgcgcataccgttcaaagtcatactccgcggcatgaaatcgctgctgttcatcattctttttaccgcgcttgtgaacgtgttttggtataaaggcgagacactgctcgttgattttcatttcatccatatttatctcgaaggaatattcaacgcgcttctcatagttctgcgcgttgcgatcctgctgtgctcgacaagcgtgcttcttacctacacgaccacacctctcggactcacggacggtcttgagcagctgctctcgccgctcgcacgcatccatgtgccggttcatgaattttcaatgatgatgacgatcgcgcttcggtttataccgacgctgatagaggagacttcgaagataaagaacgcccaggcggcacgcggcgcagacttctccgagggagggctcataaagcgtgcacgggctttgataccgattctgataccgcttttcgtatcgtcattcagacgtgcctccgatcttgcaaatgccatggaatgcagatgctacaccggcggagaaggacgcacgagaatgaacgtgcttcacgcgggaatcgtggattttgttgccgtgcttcttgttgtttttgccggagctgcggtcgtgctaatcaacagatatgctccgggatacagtatgtctctttaatatagtgcggatgattccgccacccgaaaggaagtgcctgaaacgtgaagattttgctgaagcttatgtacgacggctcggaatatgcggggtttcaggttcagcccaatgcggatacggttcaaaaacgcctcaatgaagcgtgtgagaaggtgtttccgcgtccgtgtgatgtgtgcggatgcagcagaacggatagcggagttcacgcgcttgcttttgtctgctcggtttctccggcgggaatgagcggattctccgaaggcgaaatttcaattccggcagatcgtgttcatcacgcgatgaacagataccttccgaacgatattgcggtgatcggcgccgcatttgtccccgattcgttccacccgagatacggcgcgctaggaaaggaatatgtgtaccgtatccttgacggcgccgttgagaatccgtttctttacggtcgtgtgtggcggattccgtataatttttccgacgatatgcttcgcactatgtccgaacttgcttcctgctttgtgggaaaacatgattttcatgcgttcatgtcggcgggttcgtctgtttcatcgacggagcgtaccgtgtcgtcggcatacgtggtgcggcgaagcgattcacttatcgaattcaccgttaaagcggacggattcctttacaatatggtgagaataatgacgggaacactcacggatgccgcagccggcagactgaatgaggcggatatccggcgagcgttcgaatccggcgagcgctcgtgtctcggagtaacggcaccgcctcacgggctgtatctgaaacgtgttgaatatgccgaagagccggattggaaagcggactgagtctgataagattcgcggctgttcgcttgtcgaggatcgcgttctgcatgctcaagttatatgtgaaatcttcgattgatgtgatatgtaagaatatgcggtacgaacgaatgacgtgcttgcgcgtcggaaaacgcgatgcccggagattaaaatatcccgtttatgatgattggggtgtgaaaatgccgaaaccaagaaaaagaagccttatcccgcgccgtatttcggcggaagaagccgaaaataacgtaaacgaatactatctgcgcgtttccggatggtttatgcgcgtcaagtacgctgtgcttgtactgctttttgtctatcttacggttatgcttaccgcgtatcggtcatatattacatatgacaatctggcgtaccttctcagggatttcggatcgtcgggagacattaattccggattttcggacgtgacgtacgacgagcagaacaacatgagcgtatgcgtatataagggagcgcttgccgtggcgggaaattcttccgttacgctttatgacagctcggcatcgaaaatgtttacttacgcatcggggatggattctcccgttatcgttccttcggagaagtatcttcttgcgtatgatctcggcggcacgacgtattcgctttatacaaatcttacgcgggtgttttcgagggaagcggattcggttatagaaaatgcggatataagcgacagcggcgaatttgtccttgtgcgccgcgcgcgcgattcgagatatgtcatttcatactacaattcttcatttgaatgcgaggcggactactataagagcaaatgcgtgaccgacgtgtctctgtcggacgacggcaaaaagattcttatcgtgacccttgacacagctggcgcgtcgtttcagatgcagacggagctttattcgaagggaagcgataccccgttgtcaagctactcgggagacggtatggttccgcttgattcggaattcttctccgacggatcctttgccgtgatatgcgataaggcggtgcttttctttgatgaaaacggcactctccgatctacgtatcagctttcggcggcggggatttcagcgtttgatttcaacggagatacgtttgcggtttctctttccgaaaatgttatgggggataaaaacacaataataatatttgacaacgggggaaatataagatataatattaagatagacaggaaagtggatgatatatcgcataatgaagagtatgtatacgttctcacccccggaaaaacgctgagatattccggtaccgatacggtcgacgagtgcgatgccccgattgattcaagattcataaacgaaatgggaaatttcgctttgcttagtacgcagaccgaaagccgtgccgtttttgggcgggaaaagtaaaattccacggagggtcatatgagctttattcttgacgcgatacttatagttatgtgtattgtttgcgttgctgttggtacaaagcgagggtttgtcaaaacagtcatgtcgctgctttcatctgtaatttccgcgattgcggcatatacttttactccgtactttgcaaatttcataaaggaaaaattccttatggagtctgtgtccggagggatagccgatacgatacgttcacttgtgccggcatctgacggaagttacgacctttcctcgctgttttcggatatgccgcagacgctttcgtctataatagagcgttatcacggaaatgcggagtctcttgaagcacttgttaaatcaatgacggagaccggggacgaagccgtcatgactctctcgaaagcaatagcagagccgatcgtaaacatgatctctacggtgtgcgcgtttgttgttatttttataatagcgttcgtcgttctcaaggttgtaacctgtgttgtggacggtgcgtttaaacttcccgtactgaaaacagcaaatacgcttctcgggtttgttttcggactgatccttgccgtactttttattatgatatacagcgaactttgtgcggcgctcgtttccgcgctcggaccgatctcgccgaagcttttcgggcaggatgtggtagataaaacattgcttgttaaattcttctccgagcatagtgtacttaacttggtaaataaattaatatcttagcggaggcacggatgaaactcaaatatattccgaatattctctctgcgatacgtatagctctcgtttttgcgtttgcatacgttttctttgcattctatccggacggacttgccgcggcagccgggatatttatactttccggtatcacggatgtcgttgacggacggcttgcaaggcgtttcggctgggtaacgcaggtcggaaaaattctcgatcctcttgcggacaagctgatgcagtgtacggcgctcttctgccttgcattcaaaggtcttgtcccgtggtggatatttgtattttttgccgcaaaggaacttcttatgggagcaggagccatactgcttttcagaaaaaaacatgagatcggcgtgagccgttatttcggtaaggctgcggtcgttctgttttatgcgatagtgtgcgctatattacttttcggcggtaaaatgagcgttttcggcgtaaatttgctttgtgccgttgccgcgctttgcgctgcgggcgctctggttatgtattatttcaattatctcaaaaagaaaaagaacaggaatgccggtgaaagcgatgccggagaaggggcaaatatctgatgacactttgttcaagatgccgcaagcgtgcggcagtggtattcattactaaaatcgaaaatggggaatcaaagcaggagggactgtgcatacagtgcgcacgggaactcggcataaagcccgttgacgatatgataaagaaaatgggattgagcgatcaggatatcgagcagatgaactccgatgtcgaggactttattcagtctttggaggaatcgggagcaaatctgcccgataattttcctttttcggcggacggaaccgatgatgaagaatcggacggacgcgctccggcaataaacttccaaaagcttataaacagtatgccggggacatcagaagaccgtaaagacggtaaggagaagggaaacgggaaaaagcagaaagagcgcaagtatctagatacttattgtcagaatctgaccgagaaggcgcgttcgggcggtcttgacaggatcgtaggcagagaacgcgatcttgcccgcgtcatacagatactttgccgcaggcagaagaacaatccctgcctcataggtgagcccggtgtcggaaaaaccgcgattgcagaagcgcttgcgcagaagatagtctcgggagatgttccgtacagactccgcggatgcgaaatatatcttatggatcttaccgctctcgttgcgggtacgcagttccgcgggcagtttgaatcgagagtgctggggctccttaatgaggtgaaagcggcgggaaacataattctcgtcattgacgaggtccacaacatagtcggcgcgggtgatgccgagggaagcatgaacgccgcaaacatactgaaaccggcgctttcgcgtggagaaattcaggttatcggcgctaccacgatgaccgagtacagaaaatacatcgagaaggacagcgccctcgaaagaagatttcagcccgtgcttgtggatgagccgagctttgaggacaccgaaaaaattcttcgcggaataaagcattattatgaggagtaccacggcataaagattccggactctgtactttcatatgctgtcaagctgagcgagagatatataaccgaccgttttcttcccgataaggcgattgatcttatcgacgaggcggcgtctcacatatctctttcatctccgcagataaacgagagagcacagcttatcgacgaaaagaaggctctcgaggcggagcatgccgagcttgagaccaaggctgcggacggcagcgacgttaaacctgaggtatatgagcgccttgcagaggtaaaagcacgcgagcttcagatagaaaaccgcataaatgaaattactccggcatgcgaaagcgtggaaatgaaggtctccgatcttgccgatgtcatcgagatttggaagggcatacccgcctcgacgatcaatgaagatgaatttgccggcttggagaatctcgaggagagacttcgcaaaagaataatcgggcaggacgaagcggtgtcggcggttgcccgtgcagtaaaacgcggacgtgtgggtgtttccgcaaaacgtaagccggtatcgttcattttcgcgggaccgacgggcgtcggaaagaccgagcttgtgcgtgttcttgcggcagaccttttcaagactccggaaaccctgataagacttgatatgagcgagtatatggataagttctcggtgtcgaggatcatcggatcgcctcccggatatgtaggctacgatgatgcgggtcagcttaccgaaaagatccgccgccatccgtattcggtcatactctttgacgagatcgaaaaagcgcatccggatgttatgaacattcttcttcagatactcgacgacggaagaataaccgattctcagggacggactgtaaactttgaaaataccgtgatcgttatgacgaccaacgccggttccttcggcagcgcacagactcccggattttccgagaatcagtcgaaatcgagatcggataaaacgatgaaggctctctccgagttcctccgcccggaatttctgaaccgcgtcgatgagatcattacgttcaattcgctgactcccgagaatttcaaggagatcgccgttataatgcttgacgatctcaaaaaaactctcgcggataaattcatttccttttcgtatacggatgccctcgcgggtcttgttgcggaaaagagctattccgttaaatacggagcgcgcaatatgagacgttttatacagacagagatagaggacaggattgccggcaggataatagaagcacgcggaaagctttccgcggtttctgcggatgtgtctgacggagaaataaccgtttcggcaatctgaggaaggggtatcttgatgaagaacgaagtcaggtggcagtatcttacggaaaaagagataatcgaagcttttgccgctgatattcacgccggactttctgaaaatgcggtgtcgcgtatacgcggcagattcggattcaattcaatatggcagacggagaaggtatcggcgaaaaatattgtttttgccaacctgtttgatgcgccggtgcttctccttctgatctcggcgtttataacggcatttgtgggacagtatcccgcatttgccgttatttgcgctgtcctttttgtgtcctgcggattcagaatatgctgtgaatttctgtacaggcgtgccgtttcttcgaatgtccgttccggactttttcgcgtatcggtggtgcgcgacggaaaaatgaaaaatatttttgcggatgagcttgtgccgggcgatattgttattctccgcaaaggtgataccgcgggcgccgatctgaggataatagagtcaaacggactttcggttatcgaaaacggagtaacggacaattccggcgcggttccgaaagctcccgggcggctgacggacagtaccgcaaatacaccgtgcgaaaagtggagcaacatggttttcgcttcgtccgaagtggtatccggtcatgcccgtgccgttgcggttgcgtgtggcaagcatacgctcgtatataaaaagcgcggcacgaaaaaaatcgaaggatacggcgaggcaaaggatattgcaaaggctcgccgcgacggcgctttttttgcggcgcttctccttgcgttttcgctgatttatacggtagcctgcatttttttgcttggtgggaaatacagcataagcgatatattcataggcgcattgtcatttgcgtcatcgagcgcggcagcggtttatctgaatgtattgtacttttgccgcctgaggacaattattacgctgcaaaaaaacggagtgatcctgagaaatccgtcgtcggcggagcttgcggctgattccgatgtatttgtcgtccgcgatatcggcgacataaaaaccggagaaaccgagcttgaagcggtgtttgtttcgggacgcgaccgcggagaggatgcgaagtttaagaatgactcggatgcccgggagctgtttaaaattttatctctgaattcggtaactcttccggggacggtcggagaattgttcgagtccggagacatatcggacgggtcaaaggcggcggtcgaagcgttttgcagggctgcatctctcggtgagagcgaccttgtttccggtatcggtattctcggattccgggccaaggatgaaaacaacccgtgcgcaacatcgctgtatgttgaaaacggagaatattattccgcctgcacgggggacatcgacgagatccttccgctctgcaaaaaaattcttgtacacggcgaggcgcgcttcctcgatacatatacagagggatatatccgcgaatgtgctgatacatactgtaaaagaggaagaagtattattgcgatttcaaagcgcgtttctccttataataatatttcgcgtctttccgtgcttcagacatcgatgacatttataggttttgtcgccgtgtgcgaacccgtctctcaatctgcgctggcttctgtccgtaaaatggcggacggtaaaaaagctgtgcttgcattctcgtcatctcctgcagatacggctctgtttacgggaggatgccgccgtgacgtaccgattataacgccggataatctgaaaagtttgaaaagaataaacctacagccgggtcagatatcggcagtgtgtctttatgacggaataaacagagatgaaaagcgtgcggcggtaattgaattcctaaaaaaatcgggaaggaaagtcgctttcgcggcagtttccgatgaggacaagaattcacttgcggcgtctttcctcaagatatatgtcaaagcaaaccgcgctttcggcatgaggcgcaaggatgtacggtctatggcggacattatcttttcttcagatatatttgacgaggagaacggaataaatgcacttgccgtgaaggaacgcaccttctccggaaagatgaaaagcgtgcgcacatatcttatgatttcacaggctgtacggtgcgtatttctgctgtcggtatttttctccgttcccgcgctctatccttgggtatatctcgtttgggggatagcggcggatacgattgtctctctgacaatggcgcttccggcaaaagaaaaaggctgatttttacagtgtattgtctttctgaattactttttcaagtgattcttgcgtgagatgttgtgaggtgttttcattttttcgagaattatctcggaaaaaacacaaaatattaaaaatccccttgcattaaaatgaatttcgatatacaatatatctatataattgcgttgttctgtccggcacggtacggcgcataaaatatccttgccggagaaacggtgtttgtatgcaggaaaacaatgaatgtacgcatgactgctcaagctgttccgcttcctgttcttcaagggagatacagcatgagcctttgaatcccgcaagctcggtgaagcatgtcatcggtatcgtgagcggtaagggcggcgtaggaaagtcgatcgtaacgtcgatgctgtccgtcctcacacgcagacgcgattatgaaactgcgattctcgatgcggatataacgggtccttcgataccgaaggctttcggcgcaaagggtgaagtccttaccacgggagatgcactcttgccgcttgaaacgaaaaccgggataaagatgatgtcggtcaatcttctccttgaagatgagacaagaccggtcgtttggcgcggtcccgtgattgcgggaaccgtaaagcagttctggacggatgtcatatgggatgacgttgactatatgtacgtcgatatgccgcccggaaccggcgacgttccgctgactgtctttcagtctattccgcttgacggcataattatcgtaaccactccgcaggagcttgtttcgatgattgtcgaaaaagccgtaaatatggcgaatctcatgaatgttccgattctcggaatagttgagaatatgtcgtatgtgaaatgccccgactgcggacgggagcttcatgttttcggtgaaagcaaggtcaaagcgcttgcggcaaagaccgggattgagctgcttgcgcagattccgattgacgagcggctttcggctctctgcgacaagggaataatagagcttatggagaacgattatcttgattcggcttgcgacagaataatcgaaaaactcggctgatgccgatttgtcctgtttgtatactgtaaagtatctaatatattaaaactctcaggaggaagaatttcaagatgaaaaagaaaatgacgacgatcccgttcaacgggacccagaagcaaaaggaggagcttgacgccgttatcgaggaacttcgcggcgaagagggtgcgctcatgcccataatgcagagagcgcaggatatctacggatatctcccgctcgaagttcagcgttatatcgcactcgggctcgatattccggtttccgaggtatacggcgttgcaaccttttattcgcagttcctgctcaatccgaagggtgagcatccggtaagtgtctgtctcggtactgcctgttatgtcaagggctccggcaagcttatggagcgccttgagacccttctcggagtaaagaacggcgaaatcaccgccgactgccgcttcagccttgatgcaacaagatgcattggtgcgtgcggtctcgctcccgtacttactatcggcgaggatgtatacggaagactcgagcccgccgagctcgacggtattcttgccaaatacagataaaaattatgaagattcatgagataaaagagcttctttccgcaaagctcctttacggcgaagagctcctttcaaccgatgtttattcggcgtgcgccagtgatatgatgagcgatgtactcgcctttgtcaaagatcagggagttcttctgaccgggcttgtgaatcctcaggtcataaggactgccgacatgatggacatgcgctgtgttgttcttgtgcgcggtaaaaaggctactccggaaatgacggagcttgccgagtcaatatcaattgttctgatggaatccgacatgagaatgtacgatgcgtgcggcagattgttttcggcaggacttgtcggagcctcggtgcagtgacatggctgaaaacatcaactttcactttgatgttgacggtgagaatttttcctctgccggagaagcgtccatagaggtaaagaagcgcctgcgtcagctcggattttctccggatataataaggcgcgtttctatcgccatgtatgagggtgagatcaatatggttattcacgcaaacggcggcatcgccgatgtgtcggtaactccggacgagattataatagtccttgaggaccacggtcccggtattccggatgttgagctcgccatgaaggaaggattttctaccgccaaggataatatacgtcagctcggattcggtgccggaatgggtttgccgaatatgaaaaaatatacggatcggatggacattgacagtaaggtcgggatcggaacaaagatcacgatgacggtcaagatctgacgtcgtgtatcgatggagccatattatgacaaaatataagcactccgtatctctcgatccggataagtgcaaagggtgcacgcactgcctcaagcattgcccgaccgaagccatccgcgtaagagaagggcttgcgagaattgatgcagaccggtgtatagattgcggagaatgtatacgcgtatgtccttataaagctaaaaaggcagatcacgaccccctcggtatcatggaaaactacaggtataagattgcgcttcccgcgccgagcctttacggacagtttgacaatcttgacgatatagatatagttgttcagggcctgcatgatatgggatttgacgatgtattcgaggttgctaaggcagcggagctttgctcggcatattcgagggaatatctgataaaaaacagcgttaaaaagcctgtcataagctcggcgtgtcctgttatcgtgagacttatcggcatgagatttccatatctctgcgataatgtaatgccgatacttccaccgatcgagatcgcaggtgagcttgcgagaaagaaagcggagagcgagcatccagaattgtcgtcggaggatataggcatatgctttatctcaccgtgtccggcgaaagtcagctatgttaaaaattcttttgtcggtaaaaaaagcagcattgactgtgtgatttcggtcagagatgtttactttgaacttatcgaccgcatgaaaaagataggcaatcccgaaaagtcaacggagtccggagttatcggaatcggttgggcgtcaacgggcggtgaggctacggcgatattcaatgaccgatatctcgccgcagacggaatagagaatgttatccgcgttcttgagcagatcgacaattccgattttccggagttagatttcgtcgaactcaatgcctgtccgggcgggtgcgtcggcggttatgaccgtcacaaatccgtacatagccaaagcgagacttcagtccctcagaagatatcttccggtcgcaccgaatcagtcatttgagaaaaatgttatcccggattacgcaatgtccgattcccccgtcgaatatgttcccgaaagaaagcttgccgaagaccgttccgaagcaatacgcatgatgtccgatatccaggaaatacggaaaactctgccggatatcgactgcggctcctgcggagcgccgacgtgcgcggcttttgccgaggatgttgttcgcggagacgcctgcgttgacgattgtacggtaataatgcgtatgctttttcatgagtctctcgagatgagaaaggatgcgtcgagaacggagacggaaaatggcaaagatgaagataagtcttgaaaagctgatgaaagctctctcgctgaagcatatttccggagaactcgaaagagaagcgagcagcgtatatgtaggggatatgctgagctgggtgatgagtcacgctttgcctgattgcatctgggtgacgataatgtcaaataccaacgtgatcgcggttgcgagtcttgttggcacagcatgcgttattctcacggaggatgtctgctttgacaacaatgatatcaggcttgccgacgaaaagggcgtgtgcgtgtttaccacaccgatgacatcatacgaggtctgcgaagcgatagcacttattgacggcgcgaaattatgaaattctattacgatcttcacattcattcctgcctttcgccgtgtgcggatgacttaatgacacccgcttcgattgccggaatggcgaagctcggcggacttgatatatgcgcgctgacggatcacaattccgtgaaaaactgccgtgcgttttcccgcgcctgcgatttttacggcgttattcctctgttcggcatggagttgacgacttcggaggacgtacatatgatttgtctgttctcaagcctcgacacggcatctgagttcggcagctttgtcgataccgtgaaaatcggatacaggaacaagccggagatattcggaagacagctcataatggatgaggacgacaacgttgtaggtgaagaagagaatcttctcataaacgctgctgccgtcggaatcgacgaagcttaccgccgggtcgtttctctcggaggcgcgtgttatccggcacatatcgacagagaggcaaacggaattatttcggtgctcggcgcttttccggaggactccggatttacgtcatatgagcttaacagcgaaaacgatttcgacttctatgtccggaaatatccgcatatcgcaaacttaaggcgcgttgtctgctccgatgcacactatattccggatattaacgacaggatgcattatgttgaacttgactgcgaaaaaagcggcgcggcggatgccgtgatcgcatatttgcgcggtgtgtgatcttctctcggacgggaggctcaacatgaaggaactttcactttatattcttgacattaccatgaattcggtaaaagccggtgcgaaaaacatcagtatttcgctcggcgaatacgacggtatattttcgttttcggttgaggatgacggctgcggcatgacgaaagagcagcttgagcggctttcggatccgttttttacaacgaggacgacgcggaaggtcggactcggtgttccgtttctccggatgcttgcggagcagaccggaggatatgtcgaaataaaatccagaagcgaaaaggagtatgccgatcacggaacggagcttaccgctgtgttccgtgaagacagtatagattttatcccgctcggggatatcgtttcaacggtcgttacacttattcagggcagtccggacgtggactttctgttcactcatacagctcccggagtaaacgttagacttgatacctccgagataagggaagtgctgggagaggatgttcctctttcggtacccgaggtgcttgcgtggatacgcgaaagcctcgaagaacagtacgggcaaaaataaaataatataaaacccataagaaaggattttttcagaatgaaatcattggaagaactcaaagccatccgtgaacagatgaaggacaaggtggctattcgtaccggaagcggcgatatcagaatcgttgtcggaatggcaacctgcggtatttccgccggtgcacgtccggttctcagcacatttgttgaagagatttcaaatgcgggactagccgataaggtttccgttacgcagaccggatgcatcggtatctgccagtacgaacctgtagtcgaggtgtttgaaggcgggcttgaaaataagacgacttatgtaaagatggaccccgaaaaggcaaagagagtcgttgaagagcatatcaagggcggcaagccggtcagcgaatatatgatcggcaacaccgagctttaattctgaggaggtataagagaaaatggtacgttcacatgtacttatttgcggaggtaccggctgtacttcttccggaagccccgcactgcgcgaagcgctcacaaaggagcttgaggcaaacggtctttccgaggagatcaaggtagttcagaccggttgtttcggactttgtgcgctcggtccgataatgatagtttatcccgaaggcactttttacagccgtgtcacaatagacgatattcccgaaatagtcggcgagcatcttctgaagggacgtatagtggaccgcctcgtttataacgagcaggcacacggttccgaaaacgaggatgtcgaggcttctctctcgaataccgctttctataagaagcagaagcgagttgcgcttcgtaactgcggcgtcatcaaccccgagaagatcgacgagtatatcgcaatggacggttactttgcgcttgcaaaggtactttttgagatgacgcccgacgatgttattcagaccgtgctcgactccggacttcgcggacgcggcggcggcggattcccgaccggacgcaaatggatgtttgcaaaggcaagcaagtccgataaaaagtacgttgtctgtaatgcagatgagggtgacccgggcgcattcatggaccgttcggtgcttgaaggcgatcctcatgcagtgcttgaagctatggcaattgccggatatgcaatcggtgccgacgaaggatatatctatgtccgtgcggagtatccgattgccgtaaagcgtcttcagatcgctattgagcaggcacgcgaatacggaatgctcggaaagggtattttcggaaccgacttcaattttgatattcagatccgccttggtgcaggtgcattcgtatgcggagaagagaccgcacttcttacttctattgaaggaaaccgcggcgagccccgtccgcgtcctccgttcccggcagtcaagggacttttcggtcagcctacgataatcaacaacgtagagacctacgccaatatctgccagattattctcaagggcgctgattggtttgcatcgatgggaaccgaaaagtccaagggtaccaaggtatttgcgctcggcggaaaaatcaagaataccggacttgttgaaattccgatgggaacgacactgcgcgagatcgtagaggagatcggcggaggcgtcccgaacggcaagaaattcaaggctgcccagacaggcggaccttccggcggatgtatccccgcatcgcttatcgacaccccgatcgactatgataatcttatcgcgatcggctctatgatgggctccggcggaatgatcatcatggacgaggacacctgcatggtcgatatggctaagttcttccttgagtttaccgttgacgaatcctgcggtaagtgcgcaccgtgccgtatcggtactgtccgtatgcttgaaatcctcaacaagattacatccggaaacggtgagatggaggatctcgacagacttgaagagcttgcaacctacataaagagcgcatctctctgcggactcggacagacagcacccaaccctgtgctttctactctccgtaacttccgcgacgagtacgttgcgcatattaaggacaagaaatgtcccgccggcgtatgtaaaaagcttctttcttacacgatcgatcccgataaatgtaaaggctgtacgctctgcgcgagaaactgcccggcaggcgcaattgtcggtaaggtcaaagaggttcatgttatcgacacggctaagtgcgtaaagtgcggcgcatgtatcgaaaagtgcaaattcggcgctatttcgaaaaagtaagaaaggaagagaacatacatggatatgataaatgtaaaaatcaacggcagagactacagtgttcctgccgagtctacggttcttgaggcgtgccgctatgccgggatcgatattcctacgctttgctacctcaaggatataaatcagataggtgcatgtcgtctttgccttgtcgaggttgttggtgcgcgcggacttgttaccgcatgcgtatatcccgcaaacgaaggcatggaaatactgacgaacaccgcgaaggttcaggctgcaagaaagacaaacatcgagcttgtgctttccgcacatgagaaaaaatgtctttcatgtatccgcagcacgaattgcgagcttcagaagtttgcaaatgatttcggtgcggatgccgactatttcaagggcgcggctcccgaaaaggcaatagacacttccactgctttccttgtgagagacaacaataagtgtatcctttgccgccgctgtgtcggtgcatgtgaacatcagggtataggcgcgatcggtgcggtcaaccgcggtttcgataccgagattgctccggcattcgataagactctttccgagacctcctgcatttcctgcggtcagtgcatcgttgcatgccctgtcggtgctctttatgagaaggatgataccgcgcgtgtgtttgaggctctctccgatcccacgaagcatgttgcgatctgtacggctccctcggttcgtgcaactctcggcgagtgcttcggatatgaacccggtaccgatgttgaaggcaagatggctgctgcgcttcgccgcctcggatttgacggagtttacgacatgaactttaccgccgacctcacgatcattgaggaagcacatgagttcatcgagcgcgttcagaacggcggaaagttgcccttgatcacatcgtgctcgcccggatgggttaagttctgtgagcattatttccccgagatgacggagaatctgtctacctgcaaatctccgcagcagatgttcggcgctctttataagacgtattttgcaaagaagatgggcatcgaccccaaggatatcgtatttgtttccgctatcccctgcacggcgaagaagttcgaggtcggacgtcccggtcaggatgttgacggaatgcccggcgttgatgttgcaatcacaacgcgcgagcttgcccgcatgattcagtctgccggaatcaacttccgcggtctgaaggatgagggattcgatcagcctttcgatgtcgccagcggcgcaggcgcgatcttcggtgcgaccggcggcgttatggaggctgcactccgcacggctgccgagacgattctcggaacgaagcttgaaaagcttgagtttgaggatgtccgcggaatcgagccgatcaaacgtgcttcctacaaactcggcgatcttacggttcgcgttgcggtaacatccggcacggcgaacgctaagaagcttctccgcgcagttcaggacggaaccgaacaggttgacttcatcgaggtcatggcttgccccggcggatgcgtaaacggcggcggacagcctgtgcaggatgcaaccgttcgttcgacaacagacctcaagtcgcttcgtgcagcagtgctttatcatgacgatgatacgagcgagcttcgcaagtcccatgagaatcctgcatgcataaaggtttatgaggaattccttgaggaacccggaagccatattgcacatgagatactccacacccactatattaagcgcggtctttaataaaagggaatagagataagagcagcacggaaaaccgtgctgctcttatctctttataagaatgactgaataccgtttccgctttttttggtgcttcttttcacggata

SEQ ID NO: 4571 - DNA, 32759 bp, Unknown
  16S sequences of unknown bacteria
cgctcttaccttgtgacgttaaaaggaaaacggattttccctgtcggttattttttccgttttaaccgctattcgacattataacacatgcaaacctttatttcaagcgaaattcaaataatattgttaaatccgagtgaattttttgtgttataagggcgttctttgtcctaaataagggcgttctttgcccgaagcgcgctcgtctttcatactttagcttttgcccctcaaggtaatttaatacttgttaagcgccctttttgaatatatttttgtccgattaacagcgtttttatagaaggcggtatcagcggcaaatatacaaggattaaaattaaagactgtcggttgattcgtataacccgtcaaggtgtttcacagcacgcgaactgcgcccgtatgtaccctggcgcggcatcgggaaaataatccaacagcgagttataaagcgaacaaacaacaataaaaaaccccgcaaatactcgctgcttatactctgcgctatacgagttatttaccttcgggcattacgtctcattcggaatacgacactatatgcgtggttgaacggcgagcaatctatttccttatgtgctcgttgcccatacttatactttgtgtcaaacgcacgattgcacggcgcatctcctttaagtgttgttgcgcggcatcgggaaaataatccaacagcgagttacaaagcgaacaaacaacaataaaaaaccccgcaaatactcgctgcttatactctgcgctatacgagttatttaccttcgggcattacgtctcattcggaatacgacactatatgcgtggttgaacggcgagcaatctatttccttatgtgctcgttgcccatacttatactttgtgtcaaacgcacgattgcacggcgcatctcctttaagtgttgttgcgcggcatcgggaaaataatccaacagcgagttacaaagcgaacaaacaacaataaaaaaccccgcaaatactcgctgcttatactctgcgctatacgagctatataccttcgggcattacgtctcattcggaattaaggatatcctatacacgcggagttacacggcacgagaactacaacaaaaagcccttatgtattcgtcgcccatactataacctgcgctttacacggggttacacagcttataaactgtgtccgtatatacgcataactttccgacggcggtgcgaaatccttcacgcttagctttgtcggcggcacgggtaattttgtacgcaagtatgtttaaaaacgccgtttttcggattaaaaaaagttaaactgatatgtttgtttgtcttttttacatattcacaccaaacgatatgaaattttaattaagatttttgcgcctaatagtcaaaaacgtttgaaaaaaaggtttttaacattttacagtgattgcaaaacgcaaaaatttacttgctcggaaaatttatttcgtctgtaattaaaaaatataaaaatctgcttgtggcgtttgcagccattaacaaagtattttgtcgccattaactatgatgaaagcgcgataagataaatggacgcggctaactgtttaaaattctgaaatatttatttttgaaacaaataaaaatttatcgcatagttttataacaatataaaaagtcaattttatgttgtgaaagtttattagtcgtttctttaaatattattttattccacggcttttttaaaacttcggactaaaaaaattttatttcagttgcacaattacaaaaaacaattttgtgccgaacgggaaaagaaatcaacgcttgtgtttaagtttttcgcttatgtataccacaaagatttatcttgagtcaggattgtttttatcggcgattttcgtcttttgaccttattgtctgtcttacgataagttttgtgtgctaaatatcggtatctttttcaggctttgagcgaagccttgcaagcttaccgtaaggcgtggctgaaattgtgtgttctttacgcgcttttttattgatgcgattgttgcctgtttcggcaggccttttccgttcggcggctttcggtggactaaaagcttgtaaatcaactaaaacttttactgtttcccgttgaatgaacctgtttttccatattataacgggaataaagcataattttcggctgttttcctgacgtttttattatatgtgggggggtatcctgcctgtatcgcttttctctgaacacttaacatctattgaatatttgttaattttctgcatttaagctgtttgtgcctgttctcctgccttattttccgacgcgtttttcgggagactgccgcccgttaatttacctcggtttccttatgtatcaaaatgcttaatagcgggattgtccgcccgtaaatttatccggggtttcgtttgtcgcggcacgtttgaccgaccggccgtagctttagtcaagctgcgtttacattgatgtgtttttttggagaccgattgtctgttaatttaattcgtttttcgtttgtgctttctgtagatatttgaatgccccgcaacaggacaaaaaacgtacgaccgattaatgatttgttctccggcaaaacaaagacagcgtatgctttttccgggataaagcctataagtcaaattacctgagtttccgtttttgcggcgtcatatcgttcaaaatatttctcctgtgttccacggtaaataccattatcgaaaatttggtcacgtaattcctgattacagatttcttggtgtttttatggtcgattgatattggttttcggtaaaatttatttattcgattgccaaccgttttacgtttaatcaatagaaaaagtcaataaaatcactttataaattagcaataaaattttaagaagccaaaactgctttgtatatttttgaaacatacgaaaacctattattaatataattatgatagcataacaaataataaatttcaaattttttatatcgagttttaattttttatgagatataaacaattttatctaagacaaacggagttttatttgcttgtaagtagttggctcttattaaaaattagattttcggacggtaattaggtaagaaaagcttacttgcagactaaaaagacaaaaaaatattaaaataaagcaacaataactatcaaattaatttaattctcagtaaagtttaccaatattacttgaaaacgccgatgagattgatgttttaacttgaccagtttcaaaaaagcaatactgaaaaaataaaaatcggagtttaagaattttgattgtaatttttttttgtttgtggcgggtgagttaaaaattatttaagctgattttacatgaaggaaggcttttaatttcgataaataaattatgtaatataaacataaccaaataaagtaataaaaacataaccgaatcgcgtgatttttatattttttattcagcaaaaagagtttgtgacgttctggattctgtctcaacgcgttacagcgaggttttttaaagaaaaaactatttcaaaaatatatatttatatgttaaaacaagggtaaatctaatgaaaaacatgctattattgtgttaaattgcaggatttttgtttcataaatatacttgcataaaattgtcctaaaaatgcgggtttttgcacaaaaaacagctaaaaaaaagttaaaaatagttatgaaaacatatttatgcaaagttttgtgtgttatcgttgactaatcgacaaatttcgagtataattatattgaacagtataaaataaattatgtaagtataactaaattacaagtgaggattggagattatggctgtaaaaaaaggtttgggaaggggattaagtgcccttttaagcgattcggaacaggaatacgatttcagttttcgtgaagaggaaaaaattgaagaacccgtttcttcggatgcgacaaaggaaatttcggtttctttaattgatcctaacgtcaaccagccgcgtaaacgttttgatgaagtggccatgagcgagcttgccaacagtatcaggatacatggcgttatttctcctattatattggtcaagcagcctgcaggaagatatatgattatcgcgggcgaacgcagatggcgtgcggcaaaaagggcgggactgttgactattccggctatagtgcgcgattataccccgcagcaggtaaaagaaatatcgctgattgaaaatcttcaacgcgaggaccttaaccccatagaaacagcggttgccatcaaacagcttatggacgaatatagctacacgcaggaacaggttgcggaccgcatcggaaagagccgtcctgcagtcgccaacactttaaggctgctttcgttgacaaaacccgttatggacatggttgcgtcggggaagctttctccgggacatgcaaggtgtcttgtggttgtgcttgatgcggcggaccagcttaagcttgcaaacatgggggcagataatcgcgttacggtgcgcgattttgaaaaaatggttaagaattatcttaatcccaagcccgttaagcccaaacaggagcaaagcctggaacttaaggatatggtaacgcgcatgcaaaggtcttttgcgacgaaagtatccgcacttggaaacgacagaaagggcagaatatacattgattattataacagagatgaccttgacagaatttgcgatatcctcgatattgtggaaaaatattatgaccccgcccttaacgagaataaacaataactttttacggatttaagccgattttaaccgcaaaacccccgaaaaacgattatttcgggggttttgtttcacgtgaaacattattttatgtataataaggcagtttaaaatgtttcacgtgaaacattttaacgttcagcctaattataaagcagggaaatggcaacaaaataaaagcaaattgtttcaagtgaaacaatttcagacggggaaaaggttttaatttatcgccaagcgaaaaaaaataacttgtatggattgtttttaatgaaaatgtttataaaataaggggcaggtgtaataaaaataaaattacaatgcttattttggggcgttatcggcacgggcgaaagaaattatatgcttcttacggtttgataaaatacggatgggaaagagcaaaaagataaaaatatattaaaggggacatatcaaaaactacatctgatataagaaaagacttatttataaacaaattataaaaaatgtggataactcagcttgcaatatcgggttatccacattttaattaaagttatccacattaaggcgttttaataaggggcagcgtttattttttctgttccgaatcagataagctgtttttctccgttgtcgttatttcttttttcatttttttacttgtccatttcgtaaaggtgttggttgcccatatgaccacaaccaattctaccacaaaaagaaattgcgaagacagtataagtacagtcagggtgaggaaggtacagcccgcaatatattttatcgaaataagggcaagtataacgcagcaatgaaaaaagcagaaacataaaaacattattccggaaacaaaatttgaaattttccacagggtaggattttttctgtttaattttgttctgtaccctataaaaaaattaggtttggaaaattttgcgcaaagcacataagttatgcccactacaaataaaacggcgggatacataaacgttaaaaaatcatgcgtatctaacaaaacaattgcgctcctttattattgttatgtttttataaataaattagttatgatatcatctataaatataatttaagcgatattctgattttactgtattaaaacgaaaccggcatattttgataaatctgcttttaaggctaatttgtttcgagctgaagtcagcgcccgacatttatcatgaatgaaagggaaagcaaaagacagggcgcaagcgacggctcagaaagaaagcgtaattcttaataagggtgtaccaaaacatagacctaatttttaccgatagccgatttagatttaaagtaaaacgggatttcgttcctgaacgtaattggtttatagtctaaaatagttgtaaccgttaattttgtgctaaggggatttaatctgaaaagcgaaacgaagaacaggcgataacaaagaagcaaaagacagggcgcaagcgacggctcagaaagaaagagtaattcttaatatgaggcggcgaaaaataatattacagattttatttttctgcgattaattatcggtagctgaaatagcacacagggaaagtctgcacgcgtcaattccgaaaacaaagacgcggattttccgcaagtatttttaattgtacagaaacccaaaagtaaaagatttttaaaagagaaaatcagtcgggcaaaatttatcggttaaaacgttttgaaaaaaataacgtaggataaatgtgctgctgaattgcgtttccttacggtgaataaccgagatacctaattttataacttttcaaggttatcggctgaaaagtaagcctagctattcacagacactgacctaagtaaagaacacaaattttcattgttattgaccttgttacagaagagcgtatccttacggtgaataaccgagatacctaattttataacttttcaaggttatcggctgaaaagtaagcctagctattcacagacactgacctaagtaaagaacacaaattttcattgttattgcccgcggtacgataattacaatacttatgattaacgatataccgaaacaaataaatttattaaggttatgggttgtaaaagcaatcctgattaatcacagacattgaccgaggtaaagaacacaaattttcattgttattgcccgcggtacgataatagcaatacttatgattaacgatataccgaaacaaataaatttattaaggttatgggttgtaaaagcaatcctgattaattacagacactgaccgagttaaagaacacaaattttcattgttgttgcccgcggtacagaagagcgtattttttcggagtcatgcccacgtgttttttgaattgtctgataaaatggaactcgtttgaaaaaccgcatttttgcgcgacgtcgaaaatgggaatggtgctgttctggctgagaagccgcttggcaaaatccattcttgcaacaatgaggtcctgattgggggtagttttgaaaatggctttatacagcacgtaaaagcgcgattctgaaaggttaatctgttccgccatatgagaaattgtccagtttttatcgaggttggaaaagacgcggtttcttaaagttttgaagtcgatctgagtctggtaatctatggtaagttccgtggtatcggattctatgcgcctgttaataaggcggaaaagaatatcgaagtaatcgcttattaccgactcgtagtgcttttcggcgccgaagagttcggcctccatgattttgacgatatcggtgataaagccgcagttatcggggtaatagacggtattcaatttgataccggccgcggcgagaatatcataggagtcgtcgccgctgaagtggaaccagtcgtggataaggtcgctgtcgggcgaataaaagtgttgcggcacgaatttgtcgaacaaaatcacggcgttgggtttggtaaggacggtttcgccgtccacaagcatataaacgggtttccagaaatgcagaaaagtaaattcttcaaggccctgcctgcggaacaggttaaacccttttttttccggccaggcgtggcggattctgctgattttcattaaaaagcaacctccgttcaaaaaaagcgataacgttttttcagattattcgctaattaacatagtcagccaaaaaaactttcgtcaagcgctttcgtcattaacaatattatatcacgccgtaaaagaaaatgtcaatttttatatgggtttaatgccgtaatatttcttgccaaaagtccgattatgaattataatcataattaacgtgaaatgttttgcataaaagcggaaaacttaagcaacaccgccgtatttttttcaggttttttatgtttttaatgcaaaaaatctactcagcagtttatgcggacggcggaataagtccgcaaaaaattcgggaggatacaaaaatggcattgtcaaaaatcaaaaccaagaacgggcgtcttttacccgcttacccgcttttcgtaaaggacccgtttttctcggtctggtcaccgtcggacaaacttaacgagtccgatacgattttctggacgggtgcgcgccgcagggtgtacggaatagtcagctgcgacggaaaaagctactcgtttctcggtttcaaggacaggaccgagcgtcttaaacaaacaagcgtggaacttaccgcgttcagcacggactatgcgttttccgcacccgagttcgaccttaaagtgagttttgtttctccgctcaatccgcgcaatcttaagcttttgtcctgccccgtatgctatcttacctacgaaatcaagcccaaacaaaaaatcggcaatatttcggtaagcctgttccttcacgaggaaagctgctacgataaagaggctatgcccgtgcgcggcggcgttcaggtccttgaagagggcgaatgcgcctggttcggacttaagaagcagcttgtcatgagtcaggcttacgacgacagcgcggcggagtggggctactggtacctcacgggcgaaaaggcgtttttcgtaagccgcgaagccatcgataaatacgttgcaagcggaaagctggaatttgtatgcaacgccggcagcgaaaaatacatagccgctcaaaacgagcacagtgacttaacggaaaaagttacgggcaagcttaccgtcgcgtttgacgacaccgtatctgttttctatttcggggactggcttaaaggctactggttcgagggcggaaaaaccatattcgacgcgatttcttattcttacacagaatacgacaaaatcgtcaaggaactcaacgctttcgacgcggaacttaagaaaaaagcggaaaagtacggtgaagattatcttctgatactttacgccggactccgtcaggcggtgggcgcgcataaacttgtcaaggaccgtgacggaaacgtccttttcctttccaaggaatgccactccaacggctgtatcgctaccgtggacgtaagctatccttccataccgcttttccttatctataaccccgagcttgtcaaaggcatgatgcgccccattttcaaatttaacgatatgcccgtgtggaaatacgatttcgcgccgcacgacgcgggaacctatccttattgtctgggacaggtttacggagtgaaatgccgccgcgaggacatcggaaagtattattacgacaacggcaactcaagagattacaatcagcccgatgtagcgtataattatcccatgttctacaatcttcccgcgtccgccgatatttataatttcgacggtcagatgcccgttgaggagtgcggcaacatgcttgtcatgatggcggcgacttaccttgccgacggggatcttacgcttgcaaaggctaacttcgatactcttacttcctgggttcagtatctggtaagatacggtcttatgcccggtaatcagctgtgcaccgacgattttgcgggtcacctcgacaaaaacatcaatctttccgtaaaggccatcgtgggtatacgcgcttacgcgatactgtgtaaagctttgggtaagcttaaggaagccgccgaatacgtcgacgttgccgaaacttacgcccgcgagtggagaagtatgtgcgttaccgccggtaaacagactccgcttgttttcgacgacaaaaccaattccttcagccttaaatacaacatggctttcgacgtaatgttcggcacgggacttttcgaggaagacgtgcgcgagaaagaaatcgattactatatttccgttgcaaatcagtacggcgtaccgcttgacagccgttcttcgtacaccaagtccgactggattttgtgggcggctacgcttacttccaacaccgaaaagcgcaaaaaaatgcttgcgcccgtcgcaaaattcctgcgcgagtccaccagccgctatccctttaccgattggtattacaccgacatgggcaccattcgcggagaccttggaaaccgcggctatcattacggatttaaaaacagaaccgttcagggcggattgttcattctgcttttagcggacagcggcaaaatgaaagtcggcagagaataatcgcagtaaagcaacgggcggcgtataaacagcctgctttacaattcgtccgtaaaaaaccgataaataaaaaaccgcgccccgatggacagaagtttgtcggggtgctttttttgccggaaaaaaagccgtataaaactttttttatattaagtataaaacagatttaaagaagaaaaagtcaaaagaaaaagaaagtattttttttctgcaaaaaccttatttcgatgaagttgctatcatcggataattgttgtttttcggtcgggttaaaaaaatgttttcaaatttttttcgtaaatattgtaaaacagaaacaaattaaaaaagtcggcacatttgaaaagttttaattacacttaatctatcacaaaaaaaattcatgaaaaaaacggcggcgcaaaaggaaaacagggctattttacgcggtaaagagttgaccgtttaactccgttttaaggcggcattgcgcttaatgaacatgtgaaggccgcttctaacgaaggctgaggctttaagcaaaaaatcgttgcagatgttgttgcttacgtctaagccgtagtttaagaatgccgctgcgtcctctttcggaaagcgccgaaacgtagtccgcgtaatcctgagttacggcgttgtttatctttacgggttaaagtaattgcaattctgacgggaaaagagtttttttgctttgcacggattaaaaattttcgggtccgcttttatattctttgcccatgtttacgcaaagctcggttatttccttttgcagggaggaaaataccttttgtttgtgggtaataaggcagtaggaccttttgaaatccgcgtccactacgggaaccgtgcgcagttcgcccctgtcaaggcgggcgcggaccatgcttaagggcagcacggcgatgcccagtcccgcggcggcgcagctttcggcggcctgcggattgaccgtttctataaacggcgtcacggcggccgaatgttttttcgcaagctgctcgaatttttcgcgcgacgcgcttcccgattctctaagtataaagtcgtatttgtccgcgtccttaaaccgcagtttttcgggggcgaggtaatcgggcgagcataccgcaaccagtttatcctcaaaaaactcccgcgcgtcaagatgagcgtcggtcaccgagttttccacaagcccgaagtcaagttcgcccgtaagcaccattttttccaccgagtttttgggaaatatttttatctgaagtttgaccgcggggtaaaattcccttattttttttatcatggcgggcaaaagaaaggttcctattgtgagagaagctcctattttaagtccgcaggtcttgccgctttcgtaagcggtcgattcgaaatcgtcaaaattgttaaggaccgtcaaagcgcgctcgtaaagctgtttaccggcgcttgtgatgaccatgcggttttttatgcgctggaaaagtttaacgtcgtatttcttttcaagttccgctatcgcgacgctgacggcgggctgagcgatataaagtttgtttgccgctttcgtcacggatttaagctcgcacacttccttgaatatgcgtaaatggcgcaaagtcaattcggtttctccttataatgattttattatggtatttataaaattatagtattatacaaatggtttgtcaaatgatataataatactcgaaggaagcgtttttttcgtatgaacaaggcaaaaaaatattggaaactttttactacgtgtttctatataagcgcatttacttttggcggcgggttcgtcataattccgcttatgcgccgtaggtttgtcgaagaccttaaatggctggaagaaaacgaaatgatggaccttacggcgatagcgcaatcctcgccgggcgcgattgcggttaacgcggcgatacttacggggtataaaataggctccgtcgcgggcgcgatgatagccatgcttgcaaccgtactgccgcccgtcataataattaccgtcatatcgtttttttacaacgctttccgcgagaacgccgttgtcggcgcggtcatgaaaggcatgcaggcgggcgtcgcggcggtaatctgcgacgtggttatccgcatgggcagcggagttttcaaggagaaaaacgcgcttttcgttatcatcatggcggcggctttcatactgacgttttttctggacgtaaacgtcattttcataattctgggctgtattttgctttcggtttgtattttcctgtttaaggctgccgcaaaaagcaaaaagcgcagaaaaagtctttcaaaaaacgcaaatccgacttctttagccccctccgacggggaacaggacgccgcgcaaaaagaagagcaagccacaaaatcaagcgcgcgtgaagcggaacccgcgcaaggacaacaaacatcggaagataagccgctttcgggcggcaagcaaaccgcaacgcccgaacatacggaaaacgccgagcataccgcaacgcccgagcaatcgacagtaaccgaacaaaccttaactttagataaaacaggaaataccgagcagaccttagctcccgaacatacggaaaacaccgagcaaaaagctacgcccgagcaaacggcaatgcttgaacaaaccgcaacgcccgagcaatcgacagtaaccgaacaaaccttaactttagataaaacaggaaataccgagcagaccgcaacagacgcggaagattcggacagcaagcaaattacaacgcccgagaagaaagaacttgacagtcctaaaggaaaagccgcgccgaaaaaaaccgtcggaaaaagcggcaagtccgtttcgccgtcggaaagggaaaaggagcgcgaaaaatgatttatctcgaacttttctgggtattttttcaggtaggcgcgttcagtatcggcggcggttatgcggctattcccattatacaaagcaacgtggtggaagataaaggttggctaagcatgaccaagttcaccgaccttatcacgattgcggaaatgactcccggacccattgcgataaattccgcgacgttcgtgggcaatcaggtggcgggcataggcggcggacttgtggctacggcgggctgtattctgccgtcggcgttaatagtttcgcttctggcgtttttgtattacagattccgcagtctgtcattcgtaaaagacaccatcgcacttttgcgtcccgccatagtggcgcttatcgcctcggcaggtataggcatactcattttgtcgctgtggggcgacggaggttttaccacggatatcacggcgctcaacatagtttcggtgataattttctttgcctccatgttctttttgcgcaagtacaacctcaaccccatattcgtaattatcgggtcgggcgtgctgggcgcggtattttatctcttgctgtaaaaccgtcggcggagcaaaaacgaaacgatttttaagacaaatttatctaaagcgcaatttattcgtttacggaaagacaatccggatttataataataaaggtgcgatttaaaaacgtgtcgggagttttgctgaaaacagtgtaaggcaatacttaaaataacgaattttaaaagtaaagaaaaaaaactttaaccgactttatatcggagggaaaaatgagcgaaaaattaaacgtactgtttatcacaagcgatcagcagcactacgaaaccatagggaaattcaataaaaaaatcaaaacgcccaacatcgaccgcataatcgacgaaggcgtttacatgaaccgcacttacgcggttaatcccacctgcacgcccacaagagcgtcatggattacgggcaaatatccctcgcagcacggcgcatggacgctgggaaccaagttgccggagtcgcagcacacgctgggcgaggatttcgcggcggcggggtacgaaacggcgcttataggaaaagctcatttccagccgcttgcctctaccgaaaaatatccctcgctggaggcgtatcccacgcttcaggaccttgagttctggaagacttttcacggtcctttttacggctttaaccacgtagagcttgcgcgcaaccacaccacggaggcgcacgtggggcagcattacgcgttgtggctggaggaaaagggctgcaaaaactggcgggattattttcttcagcccactggcaacatgaccaaggattcgccgcgccttcactgggatattcccgaagaataccattacgacgcctggattgccgaaagaacgaacgccatgcttcaaaattacgccgcggaagataagcccttctttttatgggcaagctttttcgacccgcatcccgactattacgctccctcgccctgggacaccatgtacaatcccgacgatatggaagtcaaaggacttttcgactccgagcatttgaggaacagcgattttcaccgcctttcgcagtgtgaaaaacccgatacatccaagtacggcaagtggctgcacggagtgcactcgcacctttacgacgaaaaggagcttaaaaagaaaatcgccgtttattacggcatggtcagccttatggacaaatacatcggcaaaattctcgataagctggacgaactgggattaagcaaaaacacgcttgtcgtattcaccaccgaccacgggcattactacggccagcacgggcttatcgcaaaaggcccttttatgttcgacgaccttgtgcgcgtgccgtttgccgcgcgccttaaaggagtcattcccgcggggaaaacttcggacgcgataatgtccagcgtggactttatgcagaccgtgcttgacttctgcggaatagaggcgcccgacggagtggcgggagtgtcgcagaaaaaagcgcttgtaacccccggcgaatccgtgcgcgattgggcgatagtggagcataatcacgagcgcggaaaagtcaacgtccgcacttatataaatcagaaatataaactgagcatatatctcaatcagccgcggggcgagcttttcgacctcgaagccgaccccgaggagcactataaccttttcgacaaccccgagtataacgaaatcaaaacccggctgctaacggaatttatacaggcggaaatggaaaaggaaccccttttcatgccgaggatagccattgcctgacgtaaggaaggtaaaatcagggctgtcgcgcaaagcaaggcaaataaaaacgcgggcttaatttaaaatcggaaaaattaaaaaaaccgtattacaaaccgttttgataaaaaaacgttcgctcaaagataaaacaaagcggatttttacaaaaaatattcctctttgttttatttttttgcaatttttataagaaattcgtgcgcaaattgcaaaaaaaattacttgcgtttgtttttaaaaagcattattatatacataatgtccaaataagaggggtgaagatatgaggaaatttttcagcgaattcaagacctttatcacccgcggcaacgttatagacatggctgtcggcgttatcgtgggcagcgcgtttaccgccatagtaaccgcgcttaccaaacaggtttttcagccgcttgtcaactgggcgcttgcgggtacgggcaacggacttgattccgcggtaaccatgcttaaggaagtcagggacgaaacgggcgcagtggacatggcaaattccatatacatcgattggggcgcctttataacggcgattatcaattttctgattgtagcgtttatcctgtttgccatcgtcaggaccataaacaaagtgcgcgacgcggcaaacgcgcgtttttacggctttgaaaaggctgaatatcttaagatgcgcatgcaggggctgaagaaaaaagacatagagctgcttgcccgtaagcgcgacgaagaagccaaagccaaagcggaacaggaaaaagcggaacaggaaaaagccgaaacgcaggacgacatactcaaagacatacgcgaacttttgcgcggcatgaccttaacctcaaacggcggtaaagaaagcgaggaagtaaaacccgaaggggaataaaaaattcgcttgttcccgttcaatcgcggcaaccgaagaggtttttttgtaatcgttccgttgctttccgccgccgaacagtcaagcccgcgcgagcaacacattgtatgcggggtttagggcgtcaggtagtcgtgtcgctgaacagtcaagcccgcgcgagcaacacattgtatgcggggtttagggcgtcaggtagtcgtgtcgccgaacagtcaagcccgcgcgcggagaacacggctgtctttggaatccgttacgctaaagaaaccgcgggcgcgatacaggcacggaaacataaaaggcggaaatcgaaaccgtcaaagtcaaacaaacgttttttcacgcactaagcggcataaaagtccgccgaaaaagtgcagtaaaatttaaccgattacgcgtcgcgataaaataaaggcgaaaaacaaaaagcctaaaaaaggcggataaaactttaaaacaatcaatcaggagaaaaatgaaagaattttcaacagttaagtgcgcccccgatacggtcaaagaatacgtttttccgtcaagagtggttcattacgaaaacgcggaaaacacgcagtctttactgaaggagaaggagcttcagattaccttaaacgaaaaggagcttaccgtagtcagaaagggcggctatgtagtgctggacttcggacgggagctttcgggcggcgtgcgcatactcgcaagtcaggcaaacgcaaaggtgcgcgtaagactgggcgaaagcgtaagcgaaactttttcctgcgccgtgggtacggaaaagcttaagacggacgacggcataaaaatcgagtccgcagaaaagtgcgcgggctgcaacgaccatgcgctgagggacgccgagtttttccttacgatactatccgatcaggaatattttcagtcgggtttcagattcgtaaggctggacgctttggaaaaggatgtggagattaaaagcatcgtcgcggtatacacgcatgcggactataagcgcgacggctttttcaagtgcgaaaacgaaacggtaaaccgcatttacgaaaccgccgcccgcacgcttaccctttgtattcagaacggtatgctgtgggacgggataaagcgcgacaggctggtatgggtgggggatatgtaccccgaagtgcttgcaggtcttgacctttacggaaatgcgagttacattcgccgcgccatagatttttcgcgccgctcgacccctcttcccgaatggatgaacaccatgcccgtctattcgctgtggtggataatgtgccttgacgaatacgtttaccgcacgggcgacacggacgcttattttaccgacaacgccgaatatctcaaacgcctaaccgaacagttcgacggttacgtcaccgatgagggtgaagtggctacgcccggtatttttctcgactggccgtcgcatgacactcccgacgaaaaagcgggcgtgcgcgccatagccgcgctcagcatgcacgccgcggacagactgttcaggcttgacggttacgtttgcccgcacacgaaaagcgtattggaaaaactaaagcgctcccgcgcggcggcaaaggacaaaaaacaggcaatcgcactcagccttatcgcgggatacgatgcggacgccgaccttttgataaaaggcggggcaaaaggaatgagtacctttatgagctgggcggtgcttaacgcggcgcacgattacgcctcggataaagccgccgccgaaatgatggaggaatactacggcgcaatgcttaaaatgggcgcaacctcgttttgggaggacttcgacgtcgagtggacaaagggagccgcgcctgtggacagactgcccgaaaagggagaaaaggatatccacggcgacttcggaaagttctgttacgtgggcttccgtcactctttgtgccacggctggagcgcgggcgtgatagactacatagtcacccgtattctgggcgtaagaattacttccccgggcggcaaaaccgtatcggtcaaacctttttccgcgttcggggatatggagggcgcagtacccgtgggcggcgggctggtcagggtaaaggtcgcagacggaaaagtcagcgcggaggctacctgcggaatacaggtaaccgtacaagaataaaaacgcaataaagcagcgtaaaattttaagaaaaaacagataaaaaaaatcaaaaagaccgttttgtttaaaaataaaaaaagtttcacaatgtgaaaagccgatgaaaaattacccgattgtattgactattttcttaaacggaatataatcgtagttgaaagggtatgttttttacggtaaaaaagcgcgacggcaacctaagtcaaaggaggacttaccatggaaatacttacaaaaaatttttgcgacactcttaaaaagctgatttcgcttccgtcggtcagggacttgtccgcgtttttagagggcgaaaccgcattcctttttatcattagggattacggcgacaaacccgccactccttcgctgctcagcgaggaacttggcgttacgaagggcaggattaccgccatcatcaacagccttacgcgcaaggacatggtaaggctggaaaaagtggacggcgacaggcgtaaagtggacgttcgcattaccgaaaaaggcaaacagtacatcaatgaaaaacttgcttccacaaacgcgtttctccgcaattttatcgataaaatcggaagggaagacgccgaggagctcatgcggatactcaaccgcacaacggaaatcatgcgcgacgagcatatcgagggactggacgcaaccgacggacacaaaataatagataattaccgtaaacatattcattgtaaggactgaaaaattccgtaaaaaacctaccgcttttctctatattccataaaggaggcggtgaacaatgaaatatatcgttaccggtgcggcagggcacttaggcgtcaaccttgtcggaaaactcatgcttaagaaagacgctattgtaaaagccgtgcttcttcccggcgagagcgccgttttcgagggcgccgaaaacgtggaaatcgtgcgcggcgacgtaacggaccgaaagtttttggagtccgtcatcgaaaaagacagtaccgtaattcaccttgcgggaatcatcgacatttgcgcgggcaacaaagaccgcgtctatcaggtcaacgtcgaagggacgaaaaacgtcgcggaagtttcgcttgaaaagggcgttgcgcgtttcgtctatacaagctccgtccacgtcatacctccccaaaacggggttaaaatgaccgagcccctttctttcgaccccgacggaatagtgggcgattacgccaagagcaagacgcttgccaccaaagcggttttcgacgccataggccgcggacttaacggcgtggtcgtttatccttcgggaataatcggccccgaggattaccgcgtgtccgagatgggcgaactttttgtggaaatagtcaaccgtaagataaggatttctttaaaaggcggctacgatttcgcggacgtgcgcgacgttgccgacggaattttagccgcggcggaaaaaggcaaagcgggcgaaggttacattctgtcgggagagtccgtgaccgtggacaggatttacgcggcggtaaggcaggtgacgggagagaaaaagcacgcgcctaaaatcgcaatgtggtttgtgcggcttttcgcttttcccatggagctttttgcgcgtatctgcggcaaaaaaccgctgtttaccaaatattcgctgtacactatttccgcgccgcacgaattttcccacgaaaaggcaacgaaggagcttaactattcaccgcgtccgcccgaggaatccatacgcgacgcaataagatggttttacctgaacaaacccgaattattcaacgaaaaagcgcttgcacggctgaaaaaggcattcgggccttcgtccgtcaggaaacccgttatgacaaaaaaagcctataaaagtcaatgatatatcattaacagaatttttacggcataaagtccgccttgaaaaagcaaaccgtcttaaaaggcggacttgctgttttttaaggcggatttttcgccttttaagcttgcccgtctgtttctgaatcccgcgcaattattttgctcttcgcgtcaagccggattctcgtctttcggacccttatttttgtcagcgtagccgcggcgcggaaaaagatgttatcttcccacttcgatattgtcaaaagcgcgttctctcatcgcgggcaaagggtggggtgaagtttcgaatcggtaatcgcacccgtcgcgctctatcaggttttggacgacgaaatgacttgccacggcttcgtaagggcgagtgagcaagccgttgtatttaaagaacgcgcagttttggggcagttccccgacctttacgtaatcctccaaaagcgcggtgttatccgccgtttctttaatcacttttcttatgtaattcttattggcttccgtaaagtcgttaaacgacagtttctcggggaaattttcctgcggaataagttgcgcgtaatccttgttttcgtaagttttcataagttccgccgcctttttaagatgagccgcctcccttataaaccgccgttcccacgcgtttttcagtttttcgtccttttcgtcaaggtatgccgaataataaagataacattcggtgtattcgcacatcagaagtttttccgtgatgctgagtgcggggtcggccaaagagtcgtattgggtaagatgctgctcttccgtcaaggcgatttcggcaaaaagacgtcttgccgcgtccgaaccgtaaagcgcgcccgcattcatgaagaaattaagggtctgacgtttggcggctgttactgccgcgatattaagccgagtctttaatccggatatttcagacggaacggtatgttttacgtcgtcgaaagggtggcggtgctgacttatcgtgggccttgcgggcattatttcggttattccgcccgtaaatatttccgctttgacgtcgctttccaatttaagcaggttggaaaatctgtacaggtggtcaacgtcctctataagcgcaaaatccagcgccgctttgacgtatcggtcggtttcgttctgcgccaggactgcgctaagctccgtgttaagctgttcgtaaagaacggcttgttcgattaagggctgcggcgacgttaacgataccgtaacccccttttgctggaattggtccgcccttgacaaaagcgccatttctcttctcaggtcctgacaggcgcattcggatatcagaaaatgctttaataaaaccgaggaaatttccaccgcgttcataaaaagaatccacatacgggcgcagggattgttttctaagtccgcgtagggggcaaagcttaacctgtcaagctccttaaagccgtcttcgattttttccttttttatttcaaacgggttgactgacgccatatttaagcatttttctccttatgtaatcatgattattatcctgttaaagccgtatatttatgcgttttgatttaatgtgaaaaggcgtacggcggcattttcgcgcaaaaaaatctaccttttcccgtttttgaggatatttttccgcttgggcggatagacgggcggattaattcataacatatcagaaaaagcctgttttgttgcaaaaaaagcttttttttccgcaaaaaacaccctttttgggcggattttgacatacggaaaaaatcaactaaaaaaggcaaaaaattttttttgttgtgtgaaaattttgacaaatatcgaaaaaacgggcaaaaaacttgcaaaatcgctttcgttatgatagtatttatatgctttgccatcgaaggtgatggcaaggtttcggctactctttatgtggacttttcggaggtacttatgaaaataaaagcaaaaagacgctttgttcaggttattgcgcttctcatggcgtttacggtggcggttacttttaccgacgtcgtttaccctgacgctgcatcttctcagcgcgtggaggcggcagtagccgcaggtcttaccgacgttaccggaacggtggacgtcgacggcttaagagaacaatattacaacgacgacgtcgtaagtaaaaacgttttttcccctaagtccgagcgctgggtgatagtggagctgggcggcgacagtatcatggatacatatctcgacacccgcacaagtctttctttcaccgattataccgattcctatgccgcgaccaagaagtcggcggccatgcttgcctcgcatcagagatttctcgacgcgctggacaaaaagggaatcgattacgaatacaaatattcctataccgcgcttaacaacggcgtggcgataaagattaaaaacgaggacctcgccaaggtgcgcgccgtcaacaacgtgaaaggcgtgtactattccgaatcctatgacgtgcccgacatggtggcggttaccaacaacgccaacgtttacaccacgggtatttacgataccacgggtatttcctataagggccgcggcatggtagtagccattctcgacacgggtctcgattattcgcaccccgccttttccattatgcccgaagacggcgacgatatctgggacaaggagtacgttgcgtccaagttcggcgctacaatggccaaaaactcgcttgcgcccgacactacggtggagcaggtttattacaacgcaaaagttccctatgcgttcgactacgccgacgacgaccccgacgtatatccgtcatattccacccacggcactcacgtcgcgggcatagtcgcgggcaaagacgacggtaaagtggtcaacgccgaaaccgacgagcgtttcgtgggcgtcgctcccgaggcgcagcttgccatcatgaaagtatttaccgacgaccccgacagcgagatgctgggcggcgcggacacgatagacattctcgcagccataaacgactgcgttgcgttgggcgtggacgtcatcaacatgagtcttggttccagcgcgggcttttcggacgacgaaagcgacgcttaccttaccggtatatataataaggttgaggaagcgggcataagccttgtcgtcgcggcaagcaacgattacagcgcgggcttcggcggcggcaacggcaccaaccttgcttccgaccccgacagcggcacggtgggttcgccctccacgtattcggcggcgctttccgttgcctccatcaacggccagaagtccccttacataatggctaacgccgacgcaagcggggagggtacggtcgcgttcatcaccgaggcttccgacgccaacggaaacgagcttgactttgtcggcggaattttcgacgccgcacaggcaaacggcgtgtcgcccaatcccgacggctcgcttactcttcaatacgtgcttgtaggcggcgtgggcagacagtccaactataccaccacggtacgcaacaaccttaagcgcagtccctcaatcgcgcttgtaaaacgcggcgacatcacgttcgaggagaaagtccagtacgcaatgagcgcgggcgcaatcggcgtcataatctacaacaacctttccggcaccataagaatgtcgctgggcgaggtggaaaaccccgttcccacctgctccataggcatggacgccggaaaactgatggaaacggcggcaaacagcaactctccgcgcggcacgggtacggttacgttctcgcgcgactacacggcgggtccctttatgtccgacttttccagctggggccccacgcccgaccttaaactcaaacccgaaatcaccgctcacggcggagaaataaccagcgcggtgcccggcggctacgacgagtacagcggcaccagtatggcggcgcccaacatggcgggcgcggtcgcgctgctccgtcagcacgtggaaagcaccgaaggactttcgggcaaagcgcttaacgcgaaagtaaaccagctgcttatgagcaccgctaccatcgcgctcaacgaagagggcaatccctattcgcccagaaaacagggcgcgggccttgcgggcatcaaagaggcgattaacaccgacggctacatcaccgtttcggacaaagaaggcaacgtgcttgacaagaccaagctggagctgggcgacgacaaatcgcgcacgggcgtttacgaaatgaattttaccgtccgcaacatgaaggacagcgccataacctacagccccaaagcttacgtcatgaccgaaacgcttgcctccgacaacaagaccgttgccgaaaaggcttatatgcttgccgacagcaaaacagagttcaaggcggacggcgcggcggttgcagagggcggaatcataacggtgcctgcgtcgggcagcgttgaagtcagcgtcaaaattactttgggcgcggacggaaaagcatatatagaaaacagctttaaaaacggaatgtacgtcgagggctttatccgccttgacaagggtaccgcgtcggaagacatcggtatacctttcctcgcgttctacggcgactggacggacggaccgcttttcgattacagcatgtacgaaatcgccgaatcggaggctgatacctccatcgaggaggaggataagttaaaggcgtccaacgcgcccactcggccgttgggactttacgacgatgaccagtacataatcgctttgggcagttatctttacgaaatgtccgacttcgataccgaaattcccgcctccgacgagtacgcggcaatctccgcttacgacgaggaaggcaaccgcacgctttacgagctttacatggtttatgcgggcttgttgcgcggcgcaaaaaccatggatatcaatataacggacagcgcgacgggagagcttatttacagcaagaccgagcacaatgtgcgcaaggcttatgccgcgggcggcgcaaatctcgggtcccccgtcatgctggaaatcgacccgcttttctacgggcttaacaacaattcatcctataccgtcacgatgagcggttctctcgactatgagggaggggaaacgcccgaaagaaattcctttactttcgactttacggtggactacgaagcgcccgtaattaccgattaccgtatccgcttcgagccgtataccgaaaacaaggaagtcaagtaccgcatttacatggacgtggacgtttacgacaaccactacgctcaggcggtgcttccctgctacgtaaaaagcaccaacacgggcaattatctcacgcttctgaccgaatatcccgtgcccgtttactcgcagaaaggttccaccaccacggtgtcgtttgaaataaccgactactacgacgaatatgcgaccacgggtaatctttacgttgccgtggacgactacgccatgaaccagaccgtttaccgcgtcaatgccgcaagcgccgttactttccccgactcggtggaaattaccacagacgacaagctttcctttaaggaaacggttaccgaaaaggtggacgacgcagacgtaacctacaacgtctacacgcttaaccttgcgcccaacgaaagctataaggcgacgatgaccgcgcttcccgattccaccgaagcggccggaatgtattggaagattgaccgtcaaagcattgtccgcggttatcagaacgaatttttcggtgcaaacgccggctcgacgaccgcaacgctttatgcttccacggattcaagcggagccgccgccgacaaaataaaggctaaaatcgaaatcaacgtttcgggtaccgcgaaagaggctcccgtccccgaatccatcaagatagaacccattcttaacgccgacgattatcttgccgacgtgagcggcggagtgctggagcttaatcccaacacgacggtaaacctgcgttccaaggtaacggtggagccgtggtatcttacgggcgtaagctacaagttcgaaagccgcaaccccgccgttgcaagcgttaccggtgcgggcgtgcttacttcgcacaaaaagggctcgacttacgtcacggtaacggctaccgcgggcggcataagcctttctaaatccgtgatgatcaccgtgggcgaagatttttacgtcaacagttattatctttatgattattatggcggtcccgaggtagtcattcccgacgaccttaacgtaatgtatcttgacaaggattgcttcaggaacaatacgaccattaccaaagtagtgcttcccaccacgcttgccgaaatccccgaagaggcgttttcgggctgtaccaatcttaaagaagtggtcattccttccgaatgtaccgtcgtgggcgaaaaggctttcgcgggatgcgtaaatctcgagaaaatagtattgcagaagtttaccgacaaggtgaacaacgcccagtctacgggcgcgattaccatcggtaagtacgccttcgacggctgccgttcgcttaccgagattgaaaatcagcagcgccttaccaccgcttacgattacgctttccgcggctgcagcgcgcttgaaagcatcgatttaagcggactcagggtcgcaggcagcttcgtgttccagaactgcacgtcgcttacttccgtaactaccgacgcaaacaccgtcatcggcgcgtatatgttcatgggctgcacttcgcttccttcgttcgacatcaaggcgtcgagagtggaaaacggcgcgttccagggctgctcttcgcttgaaaacctgactttctcaacctctaatctcaattacgtgggcgattacgcgttctacggcacggcgataagctcgcttactttgcccgccggcaattattcgctcggcgcttatgcgttcggatactgcgcgtcgcttacttccgttactctgtctgacaacacgtttatcgataaaagcaaggattcgccctttgcaggctgctcgctgttaagctcctttactgcgcccgccggcaatccttactattcgtcggaaggcggcttgctgttcaacaaggacaagacccgtctggagcttgttcccgtgggctacagcggaagccttacgcttcccgagggcgtaacgacggtgggtgacggtgcgttcagcggcataagcggtcttacctcagtggaccttaccggcgtaacggcagtgggcgcatacgcgttcagcggcagcggccttacttcgcttgttcttcccgacggcataacagtcggggaaggcgcgttcaaaaactgtaaaaatcttacttccgtggatttcggcagccttaccgccgttcccgcctatgcgttccagaactgtacgtcgcttacttccgtaaaccttgcgggcatgacgacggtgggtgacggtgcgttcagcggcagcggccttacttccgtcaccgccggcaatctcgtcaacgtgggtaaggaagctttctcttccaccaaactttcttccgtcaacttcgtcagcgtcgcaactcttggcgacggagcgtttgcaggcattgctccgcttacttccgtaacgctgggcggcgtgaccgaaatgggtcgcggcgtgttcgaaaacagtccgcgtatcgagtccgtgactttcggcgacggcacgcttgtcgtgggcgattacgctttcggcgcagtcaactccgaaaggacggctcttacttccgtttcgcttcccgattcgctggagtccgtgggcgattacgcgttctacggcgcggtaaatcttacttcgctcaatctttccggcgttaaatttgtgggcgattacgcgttctacggcgacgaaaaactcgcgggcgtagacctttcgaaagccgaatacgtgggagattacgcgttctacggcgcaaaagcgctttcgagtgcaaaccttgcttctgctaccgaaatcggcgattacgcgttctacggcagcgcgcttaattccgttacgctcggcaaagcggaaaaactcggcaagtattcctttgcttccaccgctttaaccgaggttactttgcccgcttcgcttgacgagcttacttacgacgacagctggtaccgcatcggcagcaacggcgaccccgaactcatgacgggcaaaaagaccgcccgcttcggcatcggcgcgttctccgacatacctactttaacagcaatcaacgtcgaagagggtaaccccgtgtttacttccgttgacggcgtactttactcgcgcgccgcttccggactcaggctggagcagtatcccgcgggcaaagcggatacttcttaccgcgtggcggacggcacggtccgcatcggcgacagcgcgttcgagggcagcgttaatcttgtccgcgtcgaaatgccttacacggtttatgcgataggctcctatgcgttcttcgacagctccgtcaccgattacgttttcgaaagcgtggaggctcccgttcttgaatccacttacgttgaccccgctacgcttaccgaccagacgcttataaacgcatttaccgaggcggactccaatgacgtcgcgcatacggcaaacgtgttctatgcaaacttcaaggactacgtcgcgcgcgtaaccgaggcaaagtacctcgctaccttaagcgtattctacgaggcgcccgacttcggcctcagcattacccgccccattaacggaaagggctacgatacggtcatctggaagggcttcttcaccaccgaaaattataccgcttacgccgccgaccgcacgaccaagaccgcaatcgatatgattgccgcgcttccctccgtcagcgaaatcaacgcgattctctcttccgacaagaccgacgaggagaagaagaccgccgttaccgaactcagcgtaaacgaaattcagcctgcaagaaagcagtttaacctcgtcaccgaccccgcccaggcggcgcttatagaaaacagcgcaaacctgtttgcggcagaggaggctgtgcgcgcggttaaatccgctttgggcatagatgcggtcatgacttcgcttgtcatggttcagcgtcccgacaagataaattacgtcgcgggcgaaagctttgaccccacgggtatgattatcaaggcggtttacgacgacctttcggaggttattctttccgattacgacgtcgacaaaaccgtgcttaacgaaggcgacggcgaagttaccgtaagctacggcggcaagacctgcgtcatctatatagacgttcagccgatggctgaaaaccctgacggaaacgagggcggtcaaacccccggcggcaacgagggaactcagcagcccgaaaaacccacgggacttggcggagcggctatcgccggcattgttatcggcgcggtcgtactcgcagcggccattgtcgcagcggttatcgtagtcgtaaaacgccgcagaaaaaaataagaaaattttggtcaatattaataaaaaactgttccaaaaagccttttttgggcaaaaacacgcgaaaaacacccattttcttcatttgactgaattgacgatataaaccgtattttcttgacaaaacccgtcccgacgttttataatatagtcggttaaagtgttcgacggggcaaaggtgcttcacctttctccgtcttttacactcaaggcaaggacttaaacctcaagcggaaggaaaaagaaaaattgaaatattcaatcaaaaagttaataaccgcggcaacgcttgcgcttatcctcatgtttacgcttgcggcttgcgggggcaaatccgaagaaaagccttacgattttctggttacttttaattataacgtcggcaacctcgaggctaactgccccgaccagtacctgggcgtcatggaaggcggtaaagtggctattaagcccggctataacgaggctttcaaagagcaggaagtcctcggctattatctcgagggctggtatcttcccaagcttgacgaatcgggcaaccccgtagtgggcgaggataaccgcgtagtgctggatgccaggtgggattttgccacgggtaccgtttccgccgacatgaccctttacgccaatctcgtcagaaggccttcgcttattattacgggcggcgacgaggacgtcgtatttacgggcaaacccgacgacgtaaggagcgaaccttcttcttattggcagcctaaaaaggaaggctggacgttctacggctactatgccgacgaagattaccggacgccttttggctggccttatgttttcggcaccgaggacaagaccgtctacgcaaagtttatcgagggcgagtgggctatcgtgaaggacgcggcaggttttaaagccgcggcaagcgcctcccaaaacgtctacatcgacgcagatatcgacttttcggacacggcttggagcgttatttacaactttgcaggcaaaatcgagggcaacggacattctcttacgggtatcaaggcgactttcaccgcaaacaaaaccaccaggaatttcgggcttttcgcttccgttaagagcaccgcggtaatacgcaacgtcaaattcgtgggagtagaggcggtgttcaacgcgtccataaatacttccgtgccttatcaggcggcgctttttgcgcataccatcgaaaacggagccgccatcaccgacgttaccgttacgggcactatccgcaagggcagcgtggcaagcggtatcccttacgagcttttcggcttctgcagtcaaaccgatttgtcgggcgttgaccttacgggcaccgattacagcggcatagaggttatagaggagtaattttacaaaaataattctgttttaacaaaaaaatcaaaaaaaacgttgtttttatataaaaacaggtgcaggaacgcataaagcgttcctgcaccgaaagaaagacatactctgtattacatatatataaaaatcttatcaaaccctaattgtaaaaggagaaaagaaaagatgaaaagcactaaagcgtttttcaggattgtaatagcttgcctgcttgccgtagtcatgacgtcggcagtagttgcgtgcaagcctaaaaaccccgacaatcctaccaatcagaagtataaccccgaggagcgtcctctctccatgagtatttccacgcccgacggcgttttcaacccgtttttcgcaacttccgcttacgactcctccatcgtgggaatgacgcagataagcatgctttcctccgataaagagggcaacatcgtttgcggcgacaacgagcccgtcgtggtcaaggactaccgcgtcaccaccagtgccgacggcagcaacaccgtttacgagttcattatcaaaaacggtatcaagttctcggacggcacgcctcttaccataaaggacgtacttttcaacctctacgtttacctcgaccccgcatatacgggcagcgcgaccatttactccaccaaaatagtgggactcgagcagtaccgtatgcagcgcgccagctccgacatcggtgacgacgccatgagcgcgttcgaggatcagttctacgatcaggcaaaacagcgcagacttgaccttattcagtacgcaaagctcgtcgacagcaccgtttcttctgccgacaagcccgacgatatctggaaagctgaagagaaggccgcccttgaaaaagactacgagaccgtcgccgtcgagttccgcaaggagctggagtccgactggaacaacaccgacaaggattcctacaaggactggggattcaccgaagtgtggcagattttcatgcttaacgacggacaggattcctcgctgcttctcaaagacaaccagggcaaacttgtaaaagacgaagacggcaactatcagatagaccccgagtacgccgagtacctcaaggaagaaaaagacctgtggcttgccgacaacgcgggtaagaccgataaggactgggcgattgagaccgtttacggcacctacttccaggagggcgaaactttcgcgcagaagataagaggtatgtcgctgggccttgaacagattctcaccggctgggttaccgccgacaccatactcgatatgtacgccgccgaagcaaagagcgaacacttcaaaggcgttgaccgcgtcgtgcccaccatcagcggcatcgacggtacgggcaagacgaataccgactaccacggcaacgcgctgggcgaggagcacgaagtgcttaagataaccatcaagggcgtggaccccaaggctatctggaactttgcgttcaccgtcgcgcccatgcattactattcttccaccaactacaacggcaaggactatatcgcggcgttcgaccagaccaagggcgagttcggccttgaattcgcggacgtagactttatgaacaacgtcatcaacgcacccgataaagtgggtcttcccatgggcgcgggcacctataaggcaagcaacgccacgggttcgggtaccgtcaccgccgataatttcttcaacaacaacatgatttacttcgagcgcaacacttacttcgaaacggtaggcagcgggctcagcaacgcaaaaatc

SEQ ID NO: 4572 - DNA, 32759 bp, Unknown
  16S sequences of unknown bacteria
cttccgatctggacaagagtcccggactttttttacggaaattatgaaaatttatacaaagcgtacaccgctcccgacggcaaaaggaggctctggggcgcgggaaaatacgtcgcggggctcaatatctaagctcgaaaattctcgcctgcgggcgatcgtcgaaagaaatttccaaaatcccctctttaaaggcatattccgttttcaggcgcttcgggtagccgacctccgccgcacgaacgccgcgaagtttcagtttcaccgtattcttccccttcatgttatagacgaacaacagcgcttttttctcccctttcaagccgaacgcgagcgttttatcgccgtttttcgaaaatcctttgggaaaccagggaagcgcctgccgtttgaaatcttcgttttctttataataccgaatcccctcttggacgagggcaaacagattctcgttcagttgatacagcttgctggcgaggtggattctgccgacgagcgcgttgaccatattcatcgccacgcattcctcgtctatctccttcgcgtccatcgcctccgaccacggatagctccatattcccgcctgttcgggaagcaccgccgacaaaatgttcgaaacgatatagggatagcggagataatcggtctgatcggacgtactcacgagatcggaaacggacaaggaaagatagtccattcgattgccgccgctggcgcagttttcaaagatcacctgcggataggcttccgtcagtccccgaaaccactcgaaatatgccttggcgtgttcgtaaagcccctcgcccaaactgtcggaggcataggaagtgcccatgcccgcttcgatattataatcgaatttgagatagtccgcccccagctcgtttaccattctgtccacggtgtcgctcaaatacgcgcgcacccgttcgctgcgaaaatccagctgataacggttggagaaaacgagcggtctgccgcccctctgaaagaagcagtcctctccgtaaagctctttggcgtcacccagaacgcctaccgattccggctctatccaaagccccgctttaagccccaggctcttgatgtaatccatggtatttttcaagccgtgcggatatttttttgcgctttcccgccatctgccgatatgatagaaaggattttccacctcgtcgtgccagccgcagtcgatgacgaatacgtccgcgcccgctttcttggcgtaaggagccagctcgtgcgcggtgcgctcgctcgggcagcaccaacttgcatacatatattcgttgaaaacgacgggaagagaatcgctatctccgattttgacgctgatcgcgcggcggtatttcgtgacgttttcgacgacgctctgtaaagtttttccgcaggtcagggcagcgttgcacccgacgaagctttcgccgggggacaaattttttaaaaagccgttctcgcttaaatttgcgccgccgacgttcagcgtgacgctgccgccgaagtcgcccaattcatagctccaagagctgttcgattctatctgccaaagggtgaatttctttttcggcttatcctccaagatccccatgggaagatagtttttggtagaccagctgcccgtattggaaacgcagaattttttaaagcttttgacgtcgtttccgttatagatgccgaggtcggagagcttatattcccgccacatggcttcgctgtaccagccgttatgggggacgtatactttgcatttttcatacgcgttgacgctcgtcatgccgtatacgacaaagctgccgatatattcgagagagagcgtccgatcggaaatattctccgcctcgctgcggcagcggatggtttccgcggcttcgtaatattcaaagtacgagcggacgcggacgacgtcgtttttctgttcgatgatcaggcttttgccgaatttttcttcgcggaaataatgagaaacgtattcgaggctttccgcttcgccgcaaaaaatgtttctgtcccccgtgtgttcggtggtcggtctgccgcttaatcggatttcgcagatacccgattttttccgtaccagccgacgggcgttttcgtccaattcttcgtaagcgtcccctttcagatagatcctgttttcctctatctcaaacgagagaaaggtgttttttccgccgaatacgaatgtccgcatatgttttctccttatctattattttccgagttctattttaacggattttttcgcctctgaatagtaaaagcaaatacaaaatatggtgaaatcgtataaataaagacgcgcgcattttccgcgcgctgtttttctaacttttcccctctattccccgcgattcttccctttgttccgaaaaacggctcttttttccgactgcctgcctgtaaaaccgcccttcggaaaacttccgatctcggccgataaaaaatttggtaagcggcaaatccgtgcccgacctatcgaaaaaactcttagaaatgggcgctctcctgaatttttttcatacagctcccctttgcggactccgtcgtgaatgcctgcgcgaagtgccttgtaatttccaggggacgggtgatggcgccgccgatgatgatcgtttcaaagccgtacccgagcaagcgacgcacggtgggaatatcccgtatgccgccctccgccacggggcgggcggatttgagggaatggacgaactcggcgagaaaatccagatcgggaatgggagccgttttggattcctccgtatatccgcggagggtgctggatacataatcgaagcccagcgcatccgcgcgcgccgcgtcctccaaggacacgatatccgccataatccgcttatccgaatgcgcccgtacataggcgacgagcgattccagcgtttctcccgacgggcgggggcgggcggtggcgtccatggcgataatatcgcaggggctctttatcagcgccttgatctctttgagcgtgggcgtaatgtaaatcgggctgtcggggtagtccgattttatcagcccgacgatgggcacgtctacttttttggatatttttctgatgtctttgaccccgttggcgcggatccccgcggctccgcccaatacggcggcatacgccattttgacgatgctgtccccgccgtacatgggctcgcctttcagcgcctgacaggatacgactaagccttgcggcaattctctgctcatagcaatacctctctgcattaataaattagaatcgtcggagaattataaagcgtccgctcaatacgccgcggtttccaaaagactggcgccgtatatcccggctttgctccccagctgcgcgcgcccgaccacggagggaagatttccgatccccgcgaatatatcccaggcgttcgtcaaaccgccgcccagcaggatacaatcgggcgaaaccgccgtgataatgtcgtcgagaagcagcaaaagatcggaggcaaaagcctcgacgacttccgtcatcgctcccctgccctcttcctttcgaaagaccgcgaagagttcttcgcaggaggaaattttttcgtccctttctctgcccgccctcaaaagcgccgtggcggacaaatactgctccgcgcagccgcgctttccgcagttgcagacgcgtcccccggggtgcagcgaaaaatgcccccagcgcgccgcgtcgaaatgcctgcccctcacgatcctgccgttgataaggctggcgccgcccacccccgtcccgaatgtgagcaaggtgacgtctttcggggcttcccgcagggaaagttccccgatcaaagcgcagaccgcgtcgttatccgcgcggcaggccaccgaatagcgctcttccatttcccgaacgatctccgttcccgtccagccctttaagttgtccgtcgcatagacgcagcgacccgaggcggggtcgatgtttcccgccgaggaaacgccgatgaaagacgctttctccgcctgtaaagaatcggccacttcaaaaagctgtcttactatcgcctctcgtccctcgccgccgcaggtgggcgcggagtgttcttcgaggattttcgccccgtcgaacagcgcgcccttgatcgtcgtgcctccgatgtcaattccgattttcagcattttttctctttacgggttcagtccctttttgaaagcttctatggtagcgccgagatcgtcgtaagcgtcgctgtcgggatccatgaaacgcaggcggttgataatctttccgtcggctgcggaatcgttgcagttgaaccaaacggcgcccttgatctgtttgacgtaatccgctttttccgccgcattgaattccttaaacatatcctcgacccacttcgcctgagaagccgcgtttctgcccagagcacccgaagtatctccgcccgaaccgcaggcaaactccgaaatgattacggaaaattcggggaaagtgtccttgttcttattgtacagtttggtatagcgttccttgaagctcgtcagcgtcgtgccgttgttcatctcgtagctggtggcgccgaggagctggaaatattctgtgccgggattgtagcaaagatcctcgccccaggaggaatacgggcaggaatccgcgatcggattccagatccagatgcagttatccaccccttcttcctcgaaaatatcatagaggcgctgccacgtcatcacgaaaatatcgggatcgagaagggtgatcatgccgcaatagctggtccagtccgtgttcatctcgttattgaggcggaagagaacgggcttgccgtaagccttgatatcctttgccaaacggcggaacgcttcgtcgtgcctgccgcgcaggatgtcgaacatgggcgtggaattggatcccgtgtcgttgttgttgagcgtaaactgataggtgaactgcaaaacgggttttccgttcttgccgttgccgcccgccagcgtttccgccatcttcgaagggaagtgatgcctgttggaatccccgtccccgtaaccgatatgggtataggtgggatagatgtcgtattgatagtcccacgccgtttctatggcgttctgcattttctgactgttgttcagaatcgtcttataatagctgtttttttcgtcgagctgagattcaagaccgggcatcgaccaactgaacaccccccaattcaccttatcggaagaggtcagcgaattataatattccagcgtttcgctgttccacttgggattggcgatcggcgtgccgcccttataataattgcggctgactccgcgggaattgaagcggctgtaactgtcgacgatggctttcatgtcgtcggtgcggtcggtcttcgatttcatgacgaacagcgcgaaattgactacgtcgtccgattcgcgaatgacagcgacgttgtaatagggcctttcgacgacgttgttttcatcctcgatcctgaccgaatacatatagacgtcaaagccctctttcacggtaagatcgttatagacgacgggagctgtccgcgtgaggttgtttttggctatgtattcgtcgctgtcgatatgttccagcagccattcgtcgcgatagatcccccaaggatccgcgttggacgtatagggattgctgctctccgcactcatcgtcagaatggaatcgccgagcgcgatctgcgtgcggtatttggcgatggaataatccacttccagcgcgtcggaggcgggcagcgtatacgccatgcccgccgaaacgtttaccatgcgcactttgtcgccgttatagagttccagcttaacgtcctgtcgggaattaaattccctatacgagcttttatattcgccgtttaccataaaacgggcgcccgtaatgtccgacgcgccggaaaaaccgtttttcgcgtccgcaagctcgttgtccttatagatgccgccgtatgcgaattcgatcgattcgcggtcggtgatgatatcgcccggaagcggtccgcccgaagaggagtcgtccgagctgtccgatgtatcgtccgaagagctgtcgggcagaccgctcgaagaatcgacgtcgttttccgaggaagacgaggacgaagagggtccgccgcagcctccgaagcaaaaagcgctcatcataaaagtacccaataaaactgccatgatctttttcattctttcctccaaataaaatatacaacgataccgtaaacggtacttttgtcattaaaattttgttgtttacgcactttttacgcgatgttcaacgtaatcaaattgctgtaaattccgtagggactgctcgcgtcctgccgataatacagcaccgcttttatctccgtcggagaaacttccgcgacggggattatttcgcattccttttccacgttccagccgttatacgtcttgcactgcgcctgtatttttcccgacgcgagctgcgcggaagtcgccttcaattcgcccgaagggcatacctgtctgacgagcatcgccccttcctccgctttatcggtggtggcgatattcgcgccgcccgaaaaatgggacatatccttaaaagtccacgtgttctgcgtatacccgcgcgccagataattccgagccgtcgtataggtggcggcggagagttcctcgtccagcgtcatattgtatttgcgcaaaaacgcgatttttttgcctatcgcggtcatggcgggctgcgaactccacgccgtaccgttatccgctttggcatagcctaaaaatcccacggggatctcggggcatacccgcctcatctcctccgcgtagggagcgaagaacgtgatggcaaaccaccgtcccgccatctcgggatattcgtccatcaccgctttgagtttctctatcgctttcagaccgctcaccgccgccgcagagccgttatccagcttcaattcgagaatgaggatgacgtcggtatttttcatcagcttcacgacctcgctcaaaagcgggaaggtttccccgtaacgttcgctgtaatcgtcgagcgtgtatcccctcagtttggcggaagaattgacggcgaaccacgtgccgcccggagcggtgctgcgcgcgcccgcgtccgattcgtgacagatgagcagctgaccgtccgaggtgatctgcaaatcgatctccacgtgcgtggcgccttcgtttgccgccgcggcgagagccgtgagcgagttttcgttggcatacgccgtgacgccgcggtgcgccgccagatactgcgcgcgggcgaatccgtcctttgcaaagatcgccgcggcctgtgtcagcgcgtccgcgctttgcgccgccaccccgtaacaacccgctgccatggctgcaaccgcttccgttttatcgtccgcgtaagcccagcagactttcgtcagggaggacacgtattccgccgcgagggagatgcgtccgtccgcgccgtcgaacatcagaatgttgcagccagccgcgttcgcctcgcccacgtattgccataattcgtaacgattttcgggaatggaaacggaggtcagatcgtatacggtgttgacgatatagcacacctcgtcggcgtacagcttttcgatcacctctatctccgaagaaacggccatgatgtcggacaccgtataggtattcttcatccacgccgcgaatttatccaccgtttccgcggtgagcctcacgacgggaataaaccttcctttcatgtatccgtcgaacgtttccgccaaagttttgctttcgccgccgagagatacgttcatatccgcgtcgggcgtgacgatcacggaagcggggcggaccgccgcctgctctatttcctgcattttgccgaaactgtccgcttcgaggatgagggtaggctcgacgttcaaggcgctgcccgaggaaacgacgtccaccgtctgcgtataagcagccgccgaagcggagagcgtccgcaagtttcccgccgcgagaactatggccgccgcgagcgttgcgaccgctttaaaaaatactttcatggcgtcctcctcattccttgcccacgacgacgacaaattccgagctttcgccgccgagagatacggtgacggtgcattcgcccgccgacgcggcggtgacgactgcaatcagtccctgatattctatggatgcgaccgaaacgtccgaactcgaccagacggcttccccgcttaaagacgcatccttgatcgccttcaccgtcgccttctgccccgcgcttaaaatgagctttcccgaaggcacgagaacggataatttttcgggcggcaggataacggtgacgtcgcatttcgctatcagtttttcgttatagcggacgcgtatctgcgccgttccctcgccgtttgccgtaatgacggcggtatttccgtcggcttctacgcctgcgacggcgcggctgctggtgccccatttgatttccgcggaaggatcgttcaccgacgcttccaatgtgaacgtttccccgacaaaaagttccaaagaagtttcgctgagcgtcacttccagctcgcccgaaaacgagctgctttgcgaggattcctcttgaagggaactgctttcgctgctttccgaaaaggaatccgcgctgtcgctcaaagattcggaactgtccgacggactgcctccgcaggcggaaaaagccatacagaccgccagcgccaaaaagagcgctccttttttcccattcatctcagtttccttccttcgccgcgatcaaaaaggtattcatgacgggacgggaagcgtccaaatcgtagctgcccgtatcgctggaacggatgaggacctttctctgtccgtcctggcgcacgatcaattgcgtggagccgccgccgtcgaagttcgccgcgttcggacagccgtaaaaacggataaactgcgcgatttcgggaagattgagtccgtaagtgtcctcgtccgacgtggatttcttgccgtagcgcatggattccacggcaaagagcaccaccgtgccgtcttttttgattccgatcgacgtgcgcggaatgtccgtagtctgcgcgccgttgctgttttccagcgccacggtgtcggggatttccccgtctgtcaccagcgcctgacggcacccgagtatcgtatcgaagccgtcccatttcccgtcgggagaagtcacggcgagggaaaccgtgtcgccgacggcggactgacgcatggcgctcttgttccccgtatagtcgggatgcatgacgagatagccgcagccgctttcgggggtatacgtttccagtttggtcagggtagtcttttccagcaccgccatttcgccgtagccctcggaaatatccaatttcagaacgacggagccgctcggcactttataggtgccggaggtgagcagcgcccaggcatcggcggcgggagcgacgttttcctcgacgacgtgtttgctcgtatggcgggagagcttgccctgatagacgagcttcgcctgcaccagcgtctttttgacttcggcggaagtgacgtcccccgtatagccgacgatggggcctatctgcgccttgccgtctttgagtccgaagagcatgggcgcggaagcgggaacgtccgccgcgtcgtcacgatagtcgtaaacgcctttgtcgttatgccccgctttgagaatgacgccgtccttgacgaacgcgttgacgcatttatccccgaaaaagtcggcgttgatggaggcgaggacctgtctgcccgtcgccttttcccacgccagcgcctgcgcgttcggcaccgattttttccacgtatagccgaccgtcacgttgtccgtattgccggcgtggatttccgcctttttcagatcgatttccaacgtatacaccgcggatacgtttccgttattcagcgaaaaagtgtttttcacgagccttacgccctcgctcagcatcgaagtttcgaaagaaaccgattccgcgtcgaaaagagtgggcgcatagctcgtatcgtaaacgacctcgggcacttcttcggcgctgctttgagaggagctttccccgcttcccgtgtcggaagaatccgacgtcgggcgttcgctctgttcgcccgtgctcgtgcccgcgcttgcggaactgtccgcattcgaagaattttcggaagcaggaccgccgcaagccgccgcgaacgcaaaagacagcgcaaggcaaagcgaggccaatatcttccattttcctttgatttttaaatattcggatttcatcatcctgtttctccttatcatcgattctatcgcttacagcaacgttttcccctcgatatggatcacctgaaaatccagagatttttcgttttgcagaacgcggtgagaattttcgttccattcgagagaaatattgttgcccaaatcgtcgctgaacgcatacctgcccctgccgctcaccaaaaaggtgagttcccgatagccgtccataccgctgcccacgtccgagcagagctttccgcccgataaattgaggggtacgcagcggttatttcgcatatacacgggcgtatagcgcctgcgaagcgccgccctatgttttccgcccgccgttttcttgcccgtaaacagctcgaaccagtcgccttcgggcaggtagacttcccgcgcgtcgatataatcctgcaacacgggcgcgacgaggagcgcatcgcccagcatgaattcgtcctcgacagagaaaactttttcgtcgcccgggaactccgtgacgagatggcgcataggcgaaacgcccgtttcgtgcgcttccttcatcagcgcgtacagatagggcaggagattgtagtgcagaaagaactgctcgcgcacaagtcctaaaagctttttgtccttatgataagccgctatattccacgggcttctgtcgttgatcttccaggcgcccgtaaagtcgcagcgcttattcgaaacggggtcgctgtgccactgcatgacgggcaggaacgccgccgtctgcaccgcgcgaaggtataattccgcggaagggagatatcccgaaaagcccgagatgtcgaagccccagcatcccacgcccgaaattcccgcggacaagcccgccttgataacggaggcgaactccgaccacgtcgattcctgatcccccgcccagacgaccgagtaggcgggagttccctgcccgcccgcgcgggaaaacacgatgccctcctcgcccacaaactcggcaaaggcgcgcgtgtactgttcgcaataggcgttttgcccttctttgcccgtcgtgccgtcggaaaagcggaccgttctgtcgtggataaattccccgccgtccgtcttgaagccgtccacgcctatctctttcaaatgcttgaagtgattgaaccaatgctcccgcgcggatggattggtaaaatcgggaaccatgcttcccacgcaccaggtatgcgggatttcgtagggcgtgccgtccgcgttcctcacgcactcgccgtgctctttgacgtactcgttgtctttcagtctttgggcgacgttccaatccgtttcgatgctcgcgccctgcgcatagataggtattacccataagagcagcttcaatccctcgccgtgcagtttttccaccatttccttgggatcctgccaatacgacgactttgaaaaatccatttccgaataggaagaaaattcgtccccgtttttctcgggacagaggctgccgttccaaagataatgggtgcttaaatcgctccaaggctccacgacgatgacgctgtggggaaagccaagcctttgggaaatttccacctgcttttctatttccgcctgcgttttccagcgattggcgctcatccaggcgcccaatacccatttcgggaaaagccgaggatagcccgccatcgaacgaaattcgttcatgatctctttgggggtgccttcgaacagataaatctccgcccgctcgccgttgctcccttcggcaaagctgattccgatctctccgtcggcgcgaaaatcgaaatccacctcgacgcgcgtatctacgtagaccccgaagccgtcgggcgtaaggaaaaagggcatggagagataggtgtactctccctgatagaagcatttttcgcgcaccagagcgcggacgagtttgcccttttgatcgacgctgtcgaacttttccccgaaaccgtatgcggcgcggtatgcccgccgcagcgtccaagcgaatccgtcggacgttctttctatgtatttttcttcaattttttgcataatgcccgtcaatcctttgtctttattataaaatccatctcaaacgtgcgattccagggcgaactgacgtccacgtcctccaccagcgcagccgcttcggggaaattttcgcccatatagcgcatcagctcccccttcgccgcctccacgcacttgccccgctccccgtcgagtagaaacaccgtgcagccgtacttaggcaccgcgttttcgtctatccaacgcctcgtgtgcgagcaataccccacgtcgtcgtaatagcggtgcagaagaaaatcccagtttccgcgctcgtcttttcccgcagaatacaggcacgactcgcaaatgaccgtgccgagcgtattgctcgacgtattccagcccgcgtaagcgtgaatcttaaacagcagtccctcgtcccgtaaaagctctaaaagttccagatcgctgccgccggggtgcgcgacgtccgccacggcgaccgtcttgccttccgcgagggcgtatttgagctgctccacgtattcgggcagactgcgctccacgtcgtaggcggcggtcatgcgttcgaagctctcgttcgcaagcatttccgagccgatgttgacggcgagaaaaatatcgcattcgggaagactgtatacccgcttgcatcccgccgcgcggatctgattctttatcgtcgcgtcctgagaacggtcctcgaaagcgggaataacgaaaggtccctttgcggaagcgtaatacacgtatattttcggctctctgcccgtcatatcgttgacggcgcgggcgagcatggtcatgcccgtgtcgtccgccgcgggatagacgggcactttcagctgcatacggttttctttgagatagcggcgcaccacctgctgatcgagagaggtgaagccgtaaggcgcgctgtcgtcctgcgggacgacgaaggaatccacgatcccctctttcaccatttccagggtatagagcagcgtgtcgagattcttttttcttcgctcggtataatcgtccagcgccttttggggaatttgctttttcacccgttcaaagtcggtcttttcctcttccgtcagggcgcctaagcgctctttatgggaatagcggccgtagagatgaagctccgtgccgcagtcggcgtaataatccggctcttcgtcgctgagcgaatagcagggacagcgcatcaccgtctgaaaggcaaaaattttcagcagaggatttttttctttcagacggcgcaggacatccgcgcgcgcccgaagctctttttccgactccccgtgcagccgcgagggaatcagtccgccgtaaatcaaagtatccatggcgacgaccgcataatccgctgccgcggcgttttcgagcagccaatttgccagtcccgccgtatccccgggacgttttttcagccccatcaactctttgggaggcatcgcaagcgtgaagcccgctttgggcatcagcaaagggaaacggtagttgcagggacgttcgtccaaaggtatcatcagaatgcgtttgcttttcatgtttatgccttttttcaactgatatttttaattttcctcagccctttaccgagccgatggtgagtccgcttttaatatatctgacgatgtacggatagaagcaaagaatggggataatgctcataagtatcgccgcggactgtatgtttttgatattcattaaaagccagggatcttccttttgcgaggtcacccgattgatgagcagatagatataataagcgagaggttgcgcctctttcgcgcccgtcgaaatgaacaggagcgcggagccgtagctgttccagctgcccaccatcgaaaagaagcagcaactgccgaacacgggcaaagacatgggaataatgatgagaaaaaacatctttaattcgcttgccccgtccaatctcgccgcttcctcgatatccgcgggcagaccttcgaaaaaggtcttgaacagaagcagattgaaaacgttgctgatggaaatgaggataatcgaccaaatgctgtccaaaaggtgcagcatatgcatgagaagatagatgggaataattcccgcggaaaagagcatcgtaatgatgaaatacatcatgatgccgccccggaagggacaatcgggtttggagagcgggtatgccgccagcgcttccacgagattggagcccaccgtaatgcagacggtgatgatgacggagttgaggaaggaacgccagaaatactgcgattcatagccgaaaaatatgtatttaaaaggtttcagcgtccatcccttgggaaacaaaaccacctgaacgttatacgccccgtcggaaaaagccagcgaaaaataactgaacatggggaagagaatgaggatcacgcccaggagcatcagcacgatgttgacgacgttcaaagaaatatccagcttgctctcgcggattttattgggattatgtcgaaatttagtcatatccgattcctccttttcaccacaggctgcgcttcatcgtcttggtggtaatgagattgcccaccagcatcagcaacagcgcgatcaagccgttgaacacgcccagcgccgtcgcaaacggaatgttcgtgcgattgacgacggaaatattgtaaagataggtgccgaggatgatctgcgtttcctcgaattcggcattcgcccgcatcatcgtatacacctgctcgaatcccgcgtccatgatgccgcttatattcatgaccagcatcaacgcgatggtgggcagaatagagggaatggtgagataccagatcttttgcagcttattggcgccctcgatggtggcggactcgtaatacgttttgtcgatggacatgatggcggcgtaaaacatgatgctgccccaccccgcgcccttccaggcggagaggaaaatgaccatggctttaaaccaggaattttgcgccatcagggcatagttgtcgtcgatgatgcccagcgtcacgagcagatgattgacagcgccgccctgtgcgtccatgaggcctttccaaagaccgatgacgaccgcccaggaaaggaagttcggcaaacagatgatgatgagaatcagtttgctgagcgtggcgtttttcaactcggaaagctggatagcgatgacgatggagaagggaaaacacagcgccagcttgatgaggctgatcacgagggtattgcccacggctttataaaaagaagcgtctacgaaaatgtcgagataattttgcagcgtccattccccgtgcgtgacgttatacaggacgtccgcctttgtcagattaaagctcggacctttgaacgaaaacaagacgccgagcatcggcacataggaaaagaacagcgtaaaagccgcggcggggagaatgaaccaaagcaaaaagcggtgtttttttacgcgatgccattgttccgcccaatatcctcccgttttccgctcctttttgcgggcgaaattttccttgactgtttgttccatattttacctcacaaaacccttctcaggattttcccaatttgacgcggttgtaccactccgtcatctcgttgacgatatcgtccgaccaataatagtatttaacgccgtttttctttgcgctcttttctcttaatccctgccgagtgatattgatggtacgttcgggatctgcggcgtcgatagcgcccgccaagccgcgcttggcatacgtcctcgacagaatggatatcggcgcccaatgttcgagaatgggcatcattcccatcggattggtgatgatcgtttcgtccttttccaccccgaccggccaggcgtcaaaacccgtttctctcaaatggaacaaaactttcgcctctatcgagtttgttcccgtacaatacatggagttgttgacgatattatcgatatagcttttcgtcagcttaatccatttgccgccgccggacttcgtgaccgtcccgtcctccgtttccagcgtatacgaccagggtttcatatagatgatgtcgtttgcaaaatcctctttgccgtcggcgggcgggtcgatgaccgtccaatccactccctcttcgccgccgtagaacagggaaaagttttgcagctttttggagagataatcgatgatatagagcgcgtccttcgccatatagaaaggaatgacggtataatagccgatccccgcgtcgtctcctaaatatctcgctttcttctgattgacggaaccgtttgttccgtcgccgcggatacgggtgttccattcgataatctcgtcgtgggcggcgtcgtacgtattctccatgccgtatttttgggcgagtttgctgttgacaatcgtgttgcaaagcggctgtatccaccaataggaaaggtaaacgcaggagcttttctcgttcgcaaacatactgcatatactagccgattccgcggactgccacgaggcggaaatgatttcgtttttacggagcgcgttcatatatttgacgtagcccgtgaaagcttcgttataaacgtccttttggatttttccatcttcgtccacgtaaaagaacagcgggcaatcgaacgccgccatgatcggattgatgtcgcacatattcgccccgccgataccgagggcgtgataatccttatccgtcccgaaatgcgactgcaactgcgtaagcgcttccgtcagttctccaatcgtctgcggcaccgaatcgtgatcgtcataccatccgatagcgtctaaatgctgcgtattccatacgagcgccgtgtcttccataaccgtatagccaaagtcgggaatgccgtatattcccgtcgtaccgtcctcttttgtatagcgtaccgcatcccatccgtaaggcatcagatcgatgagctgatagagaatacgccccgattccgtattttccaaaaacggcgtcaaatcgagaaacgcatcctgttcgacatacggatgatactgcgcttccgtcagtttaagaatatgatactgaccttgggtagataaaatactgttgatttcgttgtccgcactgccgtcggcaacttcgcgataattggtcttatagccggttgcctgttctatcagctgagctgtgcggtcggtgccgaatgcgggcattcccgtttcgggaaacagagctttgattgtgattttatcgtttagctccacgctccaatcgacgctttcctcatatacttcgccgcagcccgcggaaagaccgatgcaggaagccgtcaatacgagcgcgatcgccaaagaaatattctttttgaatgtcatttcaatacccccgttatttcaaacaggcggcaatggtttaccgcctgtctgattttcgcttatccttttacgcttccgctttaacggcaatcgcggtttcggtgactccccagcccttcttttcggcgtctaccgtatatccgtttgccgtcagaaaatcgccgaggactttcacatagccctggaacgcctttgcgccgttcgaatcggctgcgatcgtgccgcccgcaagcttcacggctctgccgacacgcgcctgataatatgtttcgaattgatttccgctcacccagttccagctcaaaaagctgtgaatggtgtacccgctaacccaatactgattgagcgaggcaagctgagcctcggtgagctgatcgagggaagtaaggcttcccgattgaatcgccaccgcgatagccaccgtcgaacgaatagaatcgaacgccgtgaaataattgtcgtaccctatcgccgtcaggacgttctgcaagaaagtgggaagctccacgcccaaaccttccacatattccactaacgtgacgatatacgcgctttggaaccaggaattgtcgttgtccatcaccagcgtcgcctcgccttcccattttccgccgtttttaatggcgagcgcccaataagcgatatttccgagcgctccttccgaagtcagcgtgatttcggtgtccgtagcgttctgagaaagagtcgtcagatccgccgcgcccgtgaaagccgcattggctttcagagccgcaagttccgtattaaacgtcgtccatcccgcgatttccgccgtgacgatagccgcatctttaatcaggaacgccgcgatcttatcctgttcctcggtttcaaagccttcccactgcgcctttaagtctgcgatcttttccgccgtgtcgatgagataccccgtcgtgtccgtgacgtcggcgccggctttccaacccttcattttaaaagattcgatattgccgatattcagccatgcgtcgtaaaacgctttctgttccgccgtgagagcgtcgatattcatgctctcgcccgtcttcgcttcaatggcgctttccgtcacgcgatacggaagcgtatccttcgtatagccctgcgaaacgaggacttccatcactttattcaggcaatccatgaagctgatgcccgaaacttcgctgttgtattgcaggagattggacaacctgcctccgaatacccattcgttgccgccaaatccccatacgatcccgccgtccgaatacgtccaactgttaacaaaatacttattaaggattgccaaatccgcttcttcgatcgcctgttttatgagcaggggatcttccgccgccttgatccatttggagccgagtctgacggtcgcctgcaaaccgtagtaatccgtgtgcagggtttcgtcgcccaattccgcgatcatatccagatagagctgaggaagtgcgatatcgagtccgtcgagataatcgcaagccacataaatgaattccgcgctctggaaattgttgtcccaattgagaagctgtcccttggacttgactgtaaagagaacttccgccatcttttcgagcgcttttgcgggagtcatctggaactcttcgcccggcgtgttgccgccgtcttcgcccgtaccgatagcaaatgccttgattcccgcgtcggagtaggccgcgttcgcctcgaatgcctttacgccttcgtcaaactccacccaggcgttaaatatgttcaaagacatatgataactcatctttgccttatccgtagcgtccaaagcgtcataagcggctctgatcgttctgaatttgccaagttcgctgtacaggtaccccgcgatatccgttccgtccgtcgtccagcctttataggcgtaggaagcgagattgccgagcgttccgaaatcctccgccacggctttcgcgtcgtcgctgatatccatcgcggacgctaaaacttctttcgctgtcatatacggaccgaaatccatgatattacggaatttctgttgcaattggctgtttgttccgtctgcgtcgtcgccgtaccaagtcgccacgagattgatgtcgtcctcgtaatccgatacgttttccacggtggcgtttttcagattatcgatggcgtcctgatattctttcgctttcgtaccgagttcgggcgagcctgccgccgtcatgtcataactgaaattgtaaatattctttccgtcttttacctgaaaagtagtgcaaaggttattattgagaatgttgtagtcgataatgcacaggtcgtcatctttcctgttcggatcgccgagaagcatattgaacgttttgcccctgtaagcaggctcgattcccttcggcgaataatcgacgtcggataattcttcctcggtgggaacgtatgcctccgctttcgtaacggcaaaattctcaaatttggcgccgttgaaatagtcggtgttttcggtgcgaacgcccatggaaatctcattttttatatcaagccccgccacgaaaacatagctgttttccatattcagttgctgtgtagggaaataggtatttacgtcctcgtcggtgattcttctcttatagatcgccccgtctttgacggccgctgtgaaatcgtccacctgatactcgcccatatcgtcttcgagaagtttgctctctatcgaaagcaccacttcgtccgcgtcgggttcgaaataacccgcctcgttccacgtagaggtcatgatgcagtcgccgagattataggtggtgttcgaagcgctgtcgtcgcgcgaagaaccttcgtaagcgtaccaattgcccgtcgtgacgtcgcaggcgataccgaaattgagaacataccaatcctgccacgcataatatcccataaaggcgtaaacgtcgctcttttcgtttcccgtcgtataagaaggagtgattttgacgtcggacaagtcaatggtatacgtcattttcgtattgccgctgaaacgttggggcatagcaataaccgccgcgtccaaggtggcggacagttcgtaatatgccgcggacaacgacgtggaatactcgccttttttatcgagaaccccatagctgttccaaccctgcgtggcttttaagccgcccgtattttcctcatcatgcctcttttcaccgctttgctggcgcgcgactatgtatttgctgttcttcaaactcgctacggtgtccacttcgttatagcagtcgaaagcgtccaaagaaacgccgttttcatagtaccagaaacattcgtcgttgatgaccttgccattctcgtcctgctgatagccctgacggctgacgaacatctttttcgttccgtttttctgcgtgacatagctgccgaacttataactctcgtctgcataatgtcccgctgcgtcattttctatcgcggcgttgatggcgtttgccaaagccttataatccccaatcttcgtcccttcgggcgtataggcggtataagcggcgactctcgcgtccgtgcgggccgctttatagtcctttgccgttacgggattatagactttccctccttcgacaaaaggctgctcaacttgcccccccccgtcgaagaatcgctcgtaccgctcgaatcctgcgtgctgtttgaactgctggattgtcccgagctgcttgaaccgtccgtgctgctgtcggacgtattccctttacaggaacctaaccccgacgctgttccgagcgccatgacggaacacagtaaaaagacaacaacctttttcttcatttttttcctcctcgttcctcggagatttttgatcccctgaattaagatagttgtattatatcccttatttttccatttgtcaagacttttttgaaattttttttcttttttatttctttttttgatgttttagctttttttaaggtctaaactccttaaatcttgaaaattatttttattttcctccttgcgaatttcattttttaccgcaagccccttcaaaagagctcaaaatttattttttcattttttatccctattttcaaggaggaagaaaggttccgcaagagcgccgcgtttctttctcccgcccgacgcgcctcctattttcttagcaaacgcctttttcccgccgggcggcgtcaacgcctgattttccgcgcaaaaaaaaatgcgccctgtttttacagagcgcgttttttgattatggtcattcgttttggagaacgcggacgcttttcgaaaagtttttttcccatctgtataaacaagcggatcgggatcccccatgcggcgtacaagaatcgcccgcggtccttttgtgcgtatcgctttgaaagggaaaccgtttgggacaaattccgcagcgtctttccgaaacgatttttcccgtttttcagataagttttcccaccaccgccgcgttgctcttggcgatacagtccccgtactttttcttatccttaaaataaatgcccgtgcagagaatatccacgagaaaaagctggatgattttgcttgccatggcgcccgcttccgtgggggactcggtgggcacggaggaaagcacaacgtctgcaaacctggtcagcggcgatttgtcgtgactggtgaccacgatgatcctcatgccgcaggtgcgcgccaaagcggctgcgtccaccacgtctttggtgccgcccgaaatgctgaacagcaccattacgtcctcgctgccgcaggaggagatgagtatgttttgcaggtgggcgtccctttcgcactgcgaatagatccccattttcatcaggcggttgtgcagttccaatgcgggcacataggagttgcccgcgccgaaacagcagaccgttttggcggaaaggatacattcgatcgcctcgtccaccgcggaagaagagaggcttttgcggcatttctccaaggcgtccacataattttccgaaatatcgcggatgtactccgaatcgccgggttttaaacgggcgttgctgagctcctgcgccatattcagtttaaattcctgatagccgttgaagccgagcgaacggcaaaaacgtagaatcgtcgcctccgccaccttggtatattcggcgagttccgtaatcgaaagatagatgatgttttcgtaatccaccgattcgagatattctatcagcttgcgctgcgatttggtcgtctttcccttcttgattcgttccattctgttttcaatcgaatcgttcatatcctatatccacctttttcccgcggggaaataccgctccccttcaaagcaaatttttgtagatgctctcgtcgcttccctcgatgggcgccgccccgcaagttttagagtaaaagccgtaattttttttctctacgccgccgatcacggcataggcatagcccaattctttcaagccttcgagacagtgccaaagcaacagcttgccgattccctttccgcgataggcggacgcgacgcccgtcggtccgaaaaagccgcggcaggtacattcgtaacaggcgaagccgacgatttcttttccgtccgccgccacccacatccgcacgggaaagtcgaaaaacgccgtttcgcattcgctcgcccattgcccgccgaaattctcgcggacaaagtccgtcacgaactttctgtccggcgtcatcggacgaaaaatgcgtatccccttcggagcggacgcttcctcgggcattttgaaatcgtataatttcaccaatagatcagccattttcttccctctcgattttactttatttacagacggcgattttctttcggctcccacgcgcttttatacgtttgccttagagtccgtttttgcagcaaaagcaaatgttacagagccaatacctttttgatacgacggcaataagccgcggcgagcgccacggagccgtaatcgttgggatgcaccccgtccacggtatattcggtgaaattgccgcgaaaaaacgaagaaccgtctgcaaacacgaccttccgccccgcgcgcgcatagcgggcggcaaggcggggcagccaccgccgataatagagatggagcttgatgcggtcctcgtcgtacaaatccatcgcaaaagggttgcgggaaaccaaaattacgggaacgtcggggcgaacggcaaaatagcaatcgagaaaagcgggcagattgttctccatgcgctcgtccacccccgcgttcgcctccacgtccacgacgagaagctctacgtcccttttcgcgattatctccgcgatttccctttccgcaaacgccgagccagaaaagccgtaattgagggcctctttttcgagagcgcgggaaaggatactcgtaaacaacattccggggcggctcacgcagccgccttgcgcgatggacgtgccgtaaacggcgatctttccccctttgaacttttccggcgcgcactcgctgcccgcctgcaaaccgacttccagcctttccactccgttataaagggggagatataagaggcagctttttcccgtgctttccgcgaaagaaggaaactccccttcgaaatcgacgctgcccgccgcaggacgcacgttgccgcgaaaggcatacccgccgacgcgggaatcgcggacgtacaaatcaaagccgctctgtcccgacgcgggcatatgcgtcatatcggacggacgctccacttttccccgcaccgcgacgacgggagaatcggtgaaaaagcgaagcatcacccccgcgggattcgtggataaatacgcctcgtcgggattgactttcttcaacgcttcccgttcttcggcggaaaaacggcaatacgcctcaccgcccgcgcagccgcaaagtcccaggcgcggatcccgaccgtctatccagacaacttccttttccattcttttcgtcctaccttttccccttccgaattcacgagaaacagacctttttcgtatcaactaaattatacgtaatttttcatgaaaagtcaacccttttttgaaaatttttttcatccaaaacgaacaagccccatttttttatccgaaaagtcttttcttcggacgcgatttttgtccatattccgatagaatataaaaattatttccaaactccgcaccctttttcaaaaagcatactcgctgtccgcaagactttttttgcaatttttttccttttcttccctcttggcacccccgaagccctcgggaaaaacgaattttcgagaaaagcgacgttcggcgctcgtcgttttgctcgaaggcgcgatcgttggttttcgttttgaaaatttttttcatatttaacatcgcgccgtttcagcaaggctttgcgatgttccgcttttccccgccgaatcatataataacattatcgcgtacccgcataacctttcgaaaaaacgttcataatagagagaaaaaagactcgggaggattttttatgctttggcttggaatattgatcggttttgtgctcggcggaaatatgggcgtcatttgtatggcgctcttcaaaatcaataaaaattgaccgcgccgttttaacggcacggtcttgaaattcagctatatcttttgacgacggatttcatctcgttcaatcgtttcagcatatctgcggcgagagccagatggcatctcgcccgcacgagattctgatcgggataatggatcttgaaatatttatccccgtcgagataatcggtgagaaaacgcatcccgcattccaccgtcatggaaaccgcgcccagcgccatcgtgctcttctcattctccgtaagcgacgcgcctacggcgccgataaagccctttgtgaacgcctcgtatttctccatatcgagagcgactttttttatgtccctttcgtcctccgcgcccgtgttcgcccccgatctgatggcatcgccgaagtcgaacgccaccaatcccggcatgacggtatcgaggtcgatgacggaaagatgttcgaaggaatctttatcgaacaatatgttgctgcatttggtatcgttatgcgttacccgcagcggcagttcgccgcgacgctgcattttatagacctccgtcgcggtttcttccagctccaaatagcgcccgatttccgactgcacttcccgcgcccggccgcttaaattttttccgacagcgcggcggaaagtatcgtaacgcatcaccgtgttgtgaaaatgcggaatgggaatatgcaggttttccacgggataatcggcaagatattgctgaaattcgccgaacgccctgcccgattcctccattatttttgcgttttccgcagtcaaaaaagtgacggagtcgtctatgtaacggcagcagcgccaaaagccgccgtcttccgacaaggtataatatttcccctccgccgtctgttgatagtgcagaacgccgcgctttgcgctcacgcccgtcgccttgatctttttgcggatatggcccgtgacggaaataatattttccatcacttccacgggatttttgaaaacgtaagtgttcacccgttgaagaatgtagtccttgatttctccgccgcggaaaaagaacactttatatgtggtgttgatatgtccgtacgtgatcggctcgtacgaacggtattcgccgccgatctgaaaaattttacagatttcccgaatctgctcgtcccctgccatcatagtccttcaaccttattcatcaatattttttccgttcttccgcagtcggcgctcgcgttgcacaactccgcctgcaaaaaagatttcatcatgcagtcccgcttttctatcgtataagtcgggactaatttttttaccgattccttcatgctgtccgtttcgctgtacgcttccgcatacagcttatcgagcgtattccaaaggagatcctcgtccagctgaatgggctttgcgatattgatcaggccgttcggcgtcttttgcagcccctcttccttcatcaatctttcctcatacagcttctcgccaggacgcagccccgtacagacgatatcgatatctacgttgggttccagccccgaaagcttgatgaggttataggcgagatcgtatatcttcacgggttcgcccatgtcgaggacgaatatctgcccgcccttggcgtaagcgcccgcttgaaggacgagggaaaccgcctcgggaatggtcatgaaatagcggatgatatctttgtgcgtgaccgtgacgggtccgccgtccgcaatctgctttttgaaaagcgggatcaccgagccgttggagccgagtacgtttccgaatcgcaccgccacgaattttgtgtttttgctgtggcagcctatcgtctgaatgatcatctcgcagatgcgcttggtcgcgcccatgatattggtgggattgaccgctttgtccgtcgagatctgcacgaacgtttccacgccgaactggtcggcgcagcgcgccacgttgagcgtgccgaagacgttgtttttcacggcttcgttggggctcgtttccataaggggcacgtgtttgtgcgcggcggcatggaatacgatctgcgggcggtattttccgaacacgtcgcgcatttttcccacgtcgcggacgctggcgatgagcacgagcagattgagttcgggatgattccgcttcaactcctgctcgatgtcgtaggcgttgttctcatagatgtcgagaataatgagctgcgcgggatgatgcgtcgctatctgccgacaaagctcgctgccgatagatccgccgcctcccgtgacgaggacggttttatcctcgatgtagcctatgatctcctcgatattgacgttcacctgttccctgccgagcagatcctgtatctccactttgcggagattggaaacggtcacctgtccgtccgctaactgatagatgccgggcagcaccttgacggggcatttgcagtctttacagcgattgatcacttcgctttggagctttttattggcggcgggcatcgtcacgaatatttcctgaacgccgtactcttccgccaattttttcacgtcgtgcgtcgtccccgcgaccttgacgccgctgatggattttccgagctttgtcggatcgtcgtccgcgatacatacgggcttcaaagcgattttatccgacgtgagcatctccttgatgagggtgagtcccgcgcttccgccgccgacgatcatcacccgctttttctgcgaatgtccgcccgacagataatatttcatcacgacgacgatgcgtttggaaaaacgtaccatgacggcgacataaaagagcaacgcgccgtaaacgagcgccgtgccgatattgatatacgccttctgcgtcaagaccgcaaaaatcaggttcagcgccgtcgtacagacgacggcaagactgagtttaagcgcgtcgatgatccccacggaagagaacacgaccgcgtacattccgaagaatccgaacagagcgatcgtacagacgatattgccgagcgtccatccgagaagccccgcgctgaatcccctgtcctccaccgtaatgagatacgcgaacagaatcgcaacgacgacagacagcacgtctgcgaatatcaaaaaaattttatgccaaaccgtcgcatttttacttttcatagttaatttccgcatctctttattccaccgttacgctctttgcgagattgcgcggtttatccacgtccagacctttggcgacgcttacgtaataacccatgagttgcaggggaatcaccgccagacttgcggcaaagtgttcgtccgtcctggggatatacgcggtgaaatccgccgtatcctcgatattatagttgccgtaggtggtcagccccatcaaataggcgccgcggctttttacctccaccatattgctgatcattttttcgtacagcctctgctgagtgagaacgctgaccaccagcgtaccgtcctcgatgaggctgatggtgccgtgtttgagttcgcccgccgcatacgcttcggagtgaatatagctgatctctttcattttcaggctgccttcgaggctgatggcgtaatcgatgcccctgccgatgaagaaaatatccttggcgttggcgaattttgccgcgaaccactggattcgttccttatcttccagtacgcgcttcatcttttcgggcagagccagcagctcggcaatcagacgcgcgtattcctcggaggagatttgcccgcgcaccttggcgaactccacggcgagaagatagcccgctatcagctgcgtggaatacgccttcgtggtcgccaccgcgatttcgggtcccgccagcgtatagaatacgttatccgcttcgcgcgcgatggaagagccgacgacgttgacgacggcaagcgttttggcgccgagattctttgcctccctcagcgcggcaagactgtccgccgtttctcccgactgactgacgacgatcgccagagagtctttggcgatgagcggtttgcgatagcgaaattccgacgccagctccacgcggacgggaattttcgccagatcttccatcacatactgcgccgcgacgcctacgtggtatgccgaaccgcacgccacgatatagatctgactgatctttttgatctcttcctccgttagccctaccgccgacaaatcgatttttttatcgacgatcacggaagcgagcgtatcctgcgcggctttgggctgctcgtggatctctttcatcatgaaatgctcgaagcccgctttttcggcggctttcgcatcccactttatctgcgtgatctccttttcgatctcctcgcggtcgagattgaaaaactgcacctgccccattttgaggcgggcgatttccagattgccgatataatagacgttgcgcgtgtatttcaaaatggcgggcacgtcggaagcgagatacgtttctcccttctcgacgccgatgatcatcgggctgtccttgcgcgccacgtatatctcttcgggatagtccttgaacatcactgccaaagcgtaagagccgcggacgcgcatcatgaatctcgctagcgaatcgatggggccgccgccgtattttttgtaataatagtcgagcagctttgtcgccacctcggtgtccgtctgagaatagaacttataatcgctcttgacgagcttttctttcagctcctgataattttctatgattccgttatggacggcgaccacagatttatcgtcgctgcaatggggatgcgcgttttccgtcgaaggttccccgtgcgtcgcccagcgggtgtgtccgatgccgcagcagcctttgagcgtcaagccgttattggtcttttccgcgagcaccttcaaacgtcccttcgccttgacgatctccacgtccgccgtcccgtcgcgcacggcaagccccgcggagtcatacccgcggtattcgagttttgaaagcccttcgagcaagatgggcgccgcctgatgtttgcccgtaaatcctacaattccgcacattttctctcgccctcgcttctatgccgactcatgaccgttgtttcgaatcaccgccaccaccttttcggtatacttctgacagatttccttcgtttccgcttccaccatcacccgaatgacgggttccgtgcccgattcgcgcaagaggatacgccccgtatcgcccaacgcctccgcgacctctttgaccgccgcctgcacgtcggcgtccgcctgcgccgccgctttatccttcaccttcacgttgattaaaacctgcggatacatcgccataggcgctctcagtttgctcaaaggcttttcctgcgccatcatgacttccatcactttcaagctggtgaggatcccgtcgcccgtcgaggcgtatttggaaaaaatgatgtgtcccgactgctcgccgccgatcctgtcgccgtgcgtcgccatatattcgtacacatatttgtcccctaccgccgtcttggcatactcgattccgagttcgtccagcgctttataaagtccgaaattggacatgatcgtcgtgacgactttattcgtcaccagctttccccgctccttcatatagcgggcgtagagatacatgatatgatcgccgttgacgatttctcccgtttcgtcgacgcagaggcatctgtccgcgtcgccgtcgtaggcaaagccgacgtccagccccttctccacgacgaacttccgcagtccctcgatatgcgtcgagcccgcgttctcgttgatgttcagcccgttgggttcggcgttgatgacgtacgtggtggcgcccaaagcgtcgaataccgcctttgcgatattccacgaactgccattggcgcagtccagccccaccttcactcccttaaacgagtacattcccaaagagatgaggtagccgatatagcgattgcgcccggaaacgtagtccaccgtgcgcccgattttctcgccctcggcataagggacttccgcccattgccggccgaaaacttccagctttccgtcgagataattttcgacgagcgcgatggtcttttcgtcgatcttttcgccctgaccgttgattaatttgatgccgttgtcgtaatagggattgtggctggcggaaatcatgatcccgcagtcgaacgaatccacccgcgcaatatacgctacggagggagtcgtcgtcacgtgcagaagatacgcgtccgcacccgaagcggtcaatcccgccaccagcgcgtattcgaacatatagctcgaacggcgggtgtctttgccgatgacgacgcggggcgaagccgcgtcgcccgcccgtcttttcagttccccgtaataccagccgagaaagcggccgaccttataggcgtgccccgccgtgagggtcttgttcgcctcgccgcggaaaccgtccgttccgaaatacttacccataaaacattcctcttattattcgtttatttcttccgtaaaaagtattcttatgtgttttctgaaaattatgcgtttgtaactcttcggtcagcgttttttcacgatgattccgcccgttttatagatactgtcgggagggatcacgccgcgcacgcaggagaggggatatatatgggagcgtctgccgatcaccgtaccgggattgagcacgctgttgcagcccacttccacataatcgccgagcatggcgcccatctttttcaaacccgtttccgtcctggcttccccgtcttttatcgtcactagcgatttgtccgatttcacgttggaagtgacggagccggcgcccatatgcgacttgaaccccaaaatactgtcccccacatagttgtagtgaggcgtctgaacgttgtcgaaaagaatgacgtttttcaattccaccgagttgcccacgacgcagttatcgccgaccaaagcggagccgcggataaacgcgcagtgcctcacttccgtttcggcgccgatgacgcagggtgcgcccaggtatgcggtcggcgctatttttgccgttttatgcacccatacgccgggagatatttcctcgtattcggcgggggataacgtctttcccaaacggagaataaactccttgattccttgcagcgcctcccagggatagacaaacgccgaaagatattctcttgcctgcgtatgctccaagtcatataattccgttattttcgtcatggtttctctcctcgccgtcaaatttgaagccctctttttatcttacggaaaatatagcctttccgtccaccttttcgcaaaaattctctcttttttgcgatgaattttatcgttgagcgctatacatacaaaaacagcggacgcaaaaacacatcgactttatcaatcgatgcagaatttgcagccgccgtgccatttttctttctattcaaaaaatccgcgcctcgttgaggcgccctttctcccgcatctgtgaaagtcatgtcgctctccacaacttcctcccctcgctttcgtaaaaacgtttgattcgaccgagtatccctgtatataaaatgatgctttgcataaattgcgcccctcataaagtcaaaagacctgaacaagcacaatctgcaaaatgtgttttctgtactttaccttatacataatatcacatatccgtcaccttgtcaataatttcccttgattttatatgcatttatttgaacttttttactggaaaaatttaattttaaacgaaattttccttcatttattcattctttatgaaaaatccgccctatttcttcgtcataaaaagagtatttttctttccttttcggaagtttttataactcaacgctgccctgccgcctccaaaacatttttttacttcggcggagcgaaatattaaaaaagtaaaaaatgagtcgcgcaaaataaatttttattgattttccccttcgtttttttctgtcgttttacgattt

SEQ ID NO: 4573 - DNA, 32759 bp, Unknown
  16S sequences of unknown bacteria
gtcgccttcggctcctccaaacatccaaagtcttactcaatgtagttttcatcatttttttttgagaaaagtgtaacctatcattgacgactgtacacaggactcgaacccattctgcaagccgatattgcattttttcggcaactgtgatataatacataaaattgcagtataatcgggaggaagcagaaatggcttattatttcaacgaggtttcacacacttttaacgagtatcttttggtgccgggttattcgtctgccgagtgcataccggcaaatgtcagcctaaaaacaccgcttgtaaagtttaaacgaggcgaggagcccgcgatctcaatgaatattccgctgacctccgctataatgcagtcggtttcaggggacaggcttgcagtagcgctagcgcgtgagggcggcgtttcgtttatctacggctcacaatccatagaggacgaggcggctatggttgagcgcgcaaagtcgtataaagcgggctttgttgtgagcgaatccaatgtaacgcccgacagcaccttaaaagatattttggagcttaaagccaaaaacggacactccaccgttgcggtaacttccgacggagagccgaacggcaagctgctcggtatagtcacaagccgtgattacagggtaagccgtatgtccgaggatacgcccgtaagcgattttatgacccctctcgcctcccttatagtaggcgaagaggaaaccactctcaaacaggccaacgatattatatgggatcacaagctgaattctctgccgatagtggacagagacggcaatcttaaatattttgtattccgcaaggactatgacgcgcacaaggaaaaccccaatgaattgcttgacagccacaagcgctatgtagtcggcgcgggaatcaatacccgtgattacgaggagagagtgcccgcgcttataaatgccggagcggatgtgctctgcatagattcatccgagggcttcagcgagtggcaggcgcgtacgcttaaatttatacgcgaaaaatacggcgataccgtaaaggcaggcgccggaaatgttgttgaccgcgagggctttttgttcttggcagaagcaggcgccgactttataaaggtaggtataggcggcggctctatatgcattacccgcgaaacaaagggcataggcagaggacaggccaccgcgcttatagaggtatgcaaggcaagagatgaatattttgaaaaaaccggcgtttatattccggtttgctccgacggcggcattgttcatgaccaccatatgactttggcgcttgctatgggcgccgactttatgatgctcggcagatattttgcccgctttgacgaaagcccgacaaaccgtgttaccataaacggcaattattataaggaatactggggtgaaggctcaaaccgtgcgagaaactggcagcgctacgatctcggcggcgataaaaagctctcctttgaagagggtgtcgactcctatgtgccttatgccggcagtttaaaggataatgtaagcctttcgctttcaaaggtgcgctccaccatgtgcaactgcggtgcgcttactatacccgagcttcaaaagaaagcaaagctcaccttggtttcggcaaccagcattgtcgagggcggcgcgcacgatgtcattcaaaaggacacctcctccgggcttataaaataagacatgaagcctgtattatatatagtaataccctgctataacgaggaaaaggtgctgcctgtcacaagcggtatgtttctggaaaagcttaaaagccttatttccgaagccgttatatcggatgacagccgcattatgtttgtaaacgacggcagccgcgacagcacctgggatattataacagaattatcgaaagaggaaaaatatttcaccggaatatccttaagccgcaaccgcgggcatcaaaacgcactgctcgcggggctgcttgaagccgagccgctttgcgatattaccatcagtatcgattgcgacgggcaggacgatataaacgctatggacagtatggtgcgcgaatatcttgacggcgccgaaatagtgtacggcgtgcgctcaagccgcgagaccgatacatttttcaagcgtacatccgcgcagtgcttttataagcttatgaaccgcatgggcgcaaacgtggtttacaatcacgccgattacaggcttttatcggcgcgcgtcataaaagagcttgcgaattttaaggaagtaaatattttcctgcgcggaatgattccgcttgtgggctttaagagcacctgcgtttattacgaaaggcgcgaacgcttggcgggagaaagccactatccgcttaaaaagatgatttcacttgcgcttaacggaattacgagcctttccacaaagccgataagaatcataaccgcgttcggatttatcgttgcgctgttgagctttctcggaataatatggtcggtaataacctttgccctcggcaagaccgtggcagggtgggcttcgcttgtaaccataattttctttttcagcggaattcagcttttaagcctcggcataataggggaatatataggaaaaatatatcttgaaacaaaggcgcggccgcgctttattattgaaaaaaaaacgggacagcccgacaggatgagaaatgatgatagacattaaaaatacaaatacaaccgagcttttaaatcaggcaaatgagatttttgaccaaacaagaccctttgccgagcttatgatgcgctacaagtgcgccatgcttgaggtgaagacaaagctcgatgtgctcaacacgcagctgtcccttgaaaatgaccgcaatccctttgagtccatagaatgccgtcttaaaagcgttccgagcataatcggaaagctcaaccgcaaaggtcttgagctttccgccgaaagtattgagaaaaatctcaacgatgttgcgggaatacgcgttatatgctccttcccggaggatatttatattttggcggaggagctttgctcacaggatgatatccgtcttatcgcccgcaaggactacataaaatatccgaagccgaacggctaccgcagcctgcatttgatagtggaaattccgattttccttatgcccgaaaagaaatacatgcgggtagaggtgcagttcagaacgattgcaatggacttttgggcaagccttgagcacaagcttaaatataaaaaggatataaagcaggatgtcgaagagatatccgaggagctgcgcgaatgcgccgaggaaataagccgccttgatatgaaaatgcagagcatacaccgcaaaatttccggcagcgtcggcgaagctgaaggcatatcgggcgtacagcgtgaaaaaatataaaattcactattgacaaatgacctttgtatatgtataataaattggtcacgagtaattcggctgtatagctcagttggctagagcatgcggttcatacccgcagtgtcattggttcgaatccaattacagccaccaacggcccggtggtcaagaggcctaagacaccgccctttcacggcggtaacacgagttcgaatctcgtccgggtcaccagaaaagaaacaacctttgtctgccagacaaaggttgtttcttttcaactaaatccgtcctcacggacggattgaatcccacctcagtgggatgaaatccaactgcgtcgggagatagggacggatttaatttcatctgcaaagcagatttcatccgagcatcgcccggatttcatcgcgcttgcgcgatttcattgaaaatcattgaaatctgtgatataatgtatccaaataggtgatttcaatggctgaaaataaactcgcgtacatgtcaacagaatttgcaattcaaatccttaaactgacagaaaatataaaaggacattattctctgtcaaatcagcttgaacgaagcggaacgagtattggagcaaatatccgcgaggcgaaatatgcgcacagccgtcctgattttattgcaaaactacagattgcattaaaggaatgctatgaaacagaatactggatcgagattgcccaaaaagcgagcattatctcttgtgatgttgcaaagaccgtgttgcacgactgcggatctattcgtagaatgctcatctcctctatcaataccgcaaaggagaataaagatgtcaaaaggtaaagtgtatatttcaaattatcctgacaatcctccggaatggtattggattagtggtttacatgacgcttgtattataggtacagaatcatttgagtttcccttcgattataataaatttgttggcgaaaagaatatatacaatcgaaacctcataaccttgagaattaacgcaaatggtgcgctatatgacaatgaggtgaaagagattcgtcttttcaattataggattctgaccgaggatatttctttagaaggcagagataaagtttggtggttagcagacagacttgttgatcacggtaaatactatactttagaaattgatttacaagattttgatgcttatcccgaggaatttacactcaaaataaaatttgaacgagcagaagttgacagataataggtgtacttttgttaactcttacctcgattctgctccgtttggttacttttaggcataaaaaagcaattgcaaaacgcaattgcttttttcagttatattcggctttttgccgagtgatattcacttcgcgagtatccgcgcgatataatatcactgtagtgtgacaggcaaaaatatcacgccgtgcacagctcggcatatcgctatccctttacagatgcgggaatatatagtataatctgtcaggttgatgaataacgtcagacagtattttgcgttataaatcaaaagaatttgcaaagcaaatcgtatttctttgccgtgatgttaaatcaaaatacgaagaatcggttctgacaagtaaactattgcgtttgtgaacaagtatcggagcaaatatttataaggcacagtatgcccaaggcaaaaagaattttatctcaaagttggaaatagcgcaaaatcaatgcggcgaaatcagaagaatgttgatttcctcgcttaataccgcaaaggaaggctgcagatgaataaatggattaaagaggaacggcgttttcgtgttgaagtaaccgatggttatgcaaaagattgcagaatcggttcgaaacaaggaaatgtttttcttttgaatatgaaactccgcatgagttttgtccgcatgtaatatctgaatatatacgcttgcagttccgaaagaatatgcgtgctgttttatcgcgcagtcacaaaaaacggcaatcatctgtctggttgccgttttttgtcgttttcttccgattgccctttccgaagaaaaggcaagggaaagtatagctgcgcacaaaacaagcctacacttatcggctttgccgacaaagtcaggcttgcggtttatattaatgcctgctgaacaattcaaaagtaccttaacccgagcatgttggtgtaaacttttgaattgttcaggtgcaaggtttttgcgcaattttgcgaaaaaaccttgcactttaaaaagaatcacattttgattctttttaaaatcaggcgacaatcaatggatactgacggtcaaaacaaaggttttgacccataaaatcgagattttaactcgattttatataattgcatttgctaatgcaattattcagtagacattatattaaagcttcaaacacggcttaaaagcacatcagcgtttcccttaacggtcacgctctgccccgccggtacaaatacgcttccgccctttgcggcaagcaggtcgccgccgtcccattccacgcctatttcgccgtcaagcacaagcagggacataaagctgccttcctcctttagcttaaggctgccgtcaagctttataagctcggtggtgaaaagcctgcaggaggcaagctgcctcacagaaccgaaatcggttttttcaatctgccccacactgccgaacggaagcgtgggctttgtccgccgggtaacatcaagcgccttttctatatgaagctggcgtggcttgccgtccgcaccgagtcttccgtaatccgaaacacggtaggtggtgtttgaattctgctgaacctcggctatgagtattcccgcacctatcgcgtgcagcgtaccggcggagataaaaaacacatcccccttgtgaacgggaacgaaattgcagatctccggcagagtattatcccttattctgcgctcgaattcctcacgcgaaacctctttgttaaagccgtatatcagctgtgcgccctcctcgcagtcaaccacataccacatttcggtcttgccgaattcaccctcatttttaagggcatattcatcatccggatgcacctggacagaaagcctgtccctcgcgtcgataagctttataagcagcggaaaatacggaaacgccgccgcgtttttgccgagggaggaagctccccaaagctccaatgcctcgggcaacgtcttgcctgcaagctcgccgttttcaacggtacaggcgccgtccttatggcaggaaagcacccaagcctcggcggcaacagccttatcggtttcaaagtgatagtcagtcttaagctttgtgccgccccacagataatccttgacgggcggctttaataaaagcggatacatataaaaactccttataatctgttttaacagcttaattatatcagaattgcggcgaaatacaagagtcaacggcaaagtgccggtcaaataatgaaaatgcttgacaaacagcgatttttgtgatattttatattagtatgcggcagtatgtgccgcgacagattcttttattgggaggtgtaatagtgccaacatttaaccaattggttcgcaacggtcgtgaaactgttgagaaaaaggcaaaggctccggctcttttaaagggttataactctatgaagcgccgccagaccgataacgattctccgcagaagcgcggcgtttgcacagccgtaaagacttccactccgaagaagccgaactcggcactccgtaaaattgcgagagtgcgtctttccaacggaattgaggtttcagcctacattcccggaataggtcacaatcttcaggagcacagcgttgttcttatcagaggcggtcgtgttaaggatctccccggtgtgcgttaccatatcgtgcgcggaacccttgatacgcagggcgttgcaaagagaatgcagagccgttcaaagtacggtgcaaagcgtcctaaagcaggtgcgaagtaatttttaagtgaattatctctgctgcatattaaaagcggcggcgtttataatatatgaatatataacgcctctgctcggtgccacggggaaaagcttcgagtaccaatgaattcattactatgaaggagggaagtaaagtgccaagaagaggctttgtcgcaaaacgcgatgtattgccggatccggtatacaattcaaagaaggtaacccgccttatcaacaacattatgcttgacggtaagaagggcgtcgctcagcgaatagtatacggcgctttcgacattatcagtgaaaaaacgggcaaggacccgcttgaggtatttgatcaggctatggaaaatgttatgccgcagcttgaggttaaggctgtccgtaagggcggcgccacctaccaggtaccttttgaggttcgtgccgaaagaaagcagaccctcggtctgcgctggctgacaacctacagccgcgcccgttcggagagaaccatgaaggagcgtctcgcgggcgagattttagatgccgttaacggcatgggcggcgctgccaaaaagcgtgaggatactcacaagatggcagaggccaacagagcgtttgctcattacagatggtagtttatatctactgatattttgtttccgttttatgcggattggaggttaatatgccaagaaaagtatctcttgaaatgacaagaaatattggtataatggcacatattgacgccggtaaaactaccaccacagagcgtatccttttctataccggtattaaccgtaagatgggcgaaactcatgacggcgcgtcaactatggactggatggagcaggagcaggaaagaggtataacaatcacctccgccgctaccacctgcttctggaaaaaccatcgtatcaatattatcgacactcccggacacgttgacttcaccgttgaagttcagcgttcactccgtgtgcttgacggttctgtaaccgttttgtgcgcaaagggcggtgttgagccgcagtctgaaaccgtttggcgtcaggctgacgaataccacgtaccgagaatgatatacattaataaaatggatatcatgggtgcggatttctaccacgttcttgatatgatcaaggagcgcttcaactgcaacggtgttccgattcagctgcctatcggctctgaggacactttcagaggaatcgttgaccttgttaatatggacgcggaagtttactacgatgacctcggaaaggatgtaaggcatgagcctattccggaggacatggtagagcttgccaacaaatatcacaccgagcttatcgagcatattgttgagcaggacgaagagctgatggaaaaatacttcgagggtgaagagccgtctgttgagcagattaagaagataatccgtcaggccacaatagctaataatatggtgccgatcacctgcggtacttcatacagaaacaagggcgttcagccgctcttggacgctattgtcgattatatgccggctccgaccgacattgaggctattaagggtaccaaccccgagaccggcgaggaagaggacaggcactcttccgatacagagccgttctccgctctcgcgtttaaaatcgcaaccgacccgttcgtcggtaagatttgcttcttccgcgtttactccggtactgttgacgcaggctccggcgtttacaactcggtcaagcagaataaagagcgtatgggacgtatcctgcagatgcatgctaaccaccgtgaggatatagaaacctgttacgcaggcgatattgccgctgccgtaggtctcaaaaataccaccaccggtgatacactgtgcgacgagaagcacccgattattcttgaatcaatgaacttccccgagccggttatccgcgttgctattgagcctaagaccaaagcaggtcaggaaaaaatgggtcttgcccttgcaaagcttgccgaagaagacccgacctttaaatgctataccgatgaagagaccggtcagaccattattgcgggtatgggtgagttacaccttgaaataatcgttgaccgcctgcttcgtgaatttaaggtagaggcaaatgtgggcgcgccgcaggttgcttataaagagagcatccgcaagaaggtcgaccacgaaaccaagtataagcgccagtcgggcggttccggtcagtacggccacgttaagatcatcgttgagccgaacgaatcgggcgccggctatgagtttatcaatgccgttaccggcggtaccattccgaaggaattcattcctgcggttgatacgggtatccgcggtgccttgcaggcaggcgtgcttgcgggctatccggtggttgatgttaaggtcactctgtacgacggttcttatcacgaagtcgactcttccgaaatggcatttaagattgccggttctatggcattcaaagaggcttgccgtttggcagacccggtgctccttgagcctatcatgaaggttacggttatcgttcccgaggagtatatgggcgatgttatcggcgatttgaatgctcgccgcggcgagattcagggcttcgaggatcgttcgggcgttaagcagatcaacgcgcgcgtaccgctcggcgatatgttcggttacgctaccgacctgcgctccaaaacacagggccgcggtcagtatgtaatggagccggacggctacaaggaagttccgaagagcatttccgagaagattatatccgcccgcgcaaagaaagactgataattaaagtaaataatgcttgcattttcaagtcttttttgttaaactataattaaatcaaaactgcacatagtataaggaggaaaatatacaatggcaaaggcaaaatttgaaagaaataaaccccatgttaacattggtaccatcggtcacgttgaccatggtaagaccactcttacagctgctatcaccaagtatctttctttgaagggtcaggctcagttcgaggattacgcgaacatcgataaggctcccgaagagagagagcgtggtatcacaatcaacaccgctcacgttgagtatgagactgacaaccgtcactatgctcacgttgactgccccggacacgctgactatgttaagaacatgatcaccggtgctgctcagatggacggcgctatccttgttatcgctgctactgacggtcctatggctcagactaaagaacaccttctccttgctcgtcaggttggcgttccgtacattgttgtattcatgaacaagtgcgaccaggttgacgatcccgagcttcttgagctcgttgagatggaaatccgtgagactcttgataagtatgagttcccgggcgacgacaccccgatcatcaagggttctgctcttgttgctcttgagtgcacctctaccgatccgaacgctccggagtatgctccgattaaagagcttatggacgctgttgacagctacatcccgactccggatcgtaagtctgacctcccgttccttatgccgattgaggacgttatgaccatttccggtcgtggtaccgttgttaccggccgtgttgagcgcggacagctcaatgcaggcgatgaagttgaaatcatcggtcttaccgaggagcgcaagaagactgttgttacctctatggaaatgttccgcaagactcttgacttctgtgaagccggcgataacgttggtgcacttctccgcggcgttggccgtgacgaggttgagcgcggtcaggttctctgcaagcccggctcaattcatccgcacaccaagttccacggtcaggtttatgttctgaccaaggaagaaggcggccgtcatactccgttcttcaacaactatcgtccgcagttctacttcagaactaccgatgttaccggcgttatcactcttcccgaaggcaccgagatgtgcatgccgggcgataatgtcgagatggatgttgagcttatcactcctatcgctattgaagagggactccgtttcgctatccgtgagggtggccgtaccgttggttccggcgttgttaccaaggttaacgcttaatttcaatataagccttttaaaagaccctatccgcagcaatgcggatagggtctttttcggatgttattttagatatgcaaaagcacaaaaccacaggctcccttatgtaaagggcgactcctcacactgtaaggagatgtcacgaagtgacagaggtaactgagggattgttggaaattaaagtttatttaatgcctgctgaacaattcaaaagtaccttaacccgagcatgttggtgtaaacttttgaattgttcgggtgcaagcgacaatcaatggaaactgacggtcaaaacaaaggttttgacccataaaatcgagattttaactcgattttatataattgcatttgctaatgcaattattcagtagacattatttacagattaaagattaaatatgcaaaatacagtttcggtatataaatcggctctctgatcattttaagcttgtaacaaccccttcggcagccatacggctgccgtctcggtcggtgcttctgcttcgcagaggcgtccgccggacacccgcacccaaacaccggggaggcaatcatttgctgtcaacataataattatataactattctgttgtgaatccggtgcagagatattaccgccgaattctttattccgaatcccttttgttggggcgctttttaaagcgcgaaagccgcttcacatcgtcgcggtgtatcttaaacggcatggaatcgctgtctgtcaggcggacggtaagataaccggtcataagattcgcatcggtcacgacagcgttgccctgcggtgttttaacggttgcaccgacaccgggagtcagcgaattcaaatattcataggcgtcctgctcgtattttaagcagcacatcagtcttccgcagctgcccgaaattttggtgggattgagcgagagtccctgctcctttgccattttaatggaaaccggctggaaatcatttaaaaactgcttgcagcaatatggtctgccgcagattccgagtccgccgagcattttcgcctcatcacgcacgcctatctggcgcagctcaatgcgggtgtggaagcgcgatgcaagatcctttacaagctcgcggaaatccaccctgccgtcggaggtgaagaagaaaacaatcttgcttgaatcaaaagaatattccacatcgaccagcttcatatcgagcttgtgagccaaaacaagctcctcgcagattccgaaggcttccttttccttccttttattttcatcgcggcgagccagatcattttcggtcgccttgcggagcaccttgcgtaacggctttacgatcgcgtcgttatccacctcatgatttgcggcgctgaccgtgcccatctccgtgccgttttgggtctcaactataaccgattcgccgatttcggcggtgattccggcaggatcaaatgaataagccctgccattttccttgaattttacggatattatttctgtcatatactcctccgtcagctgatttcggtcgctttgcagacaagcgccgcgaaaagcagactcaaattaacatttgttgtaaggctttgctcaaagccgtcaagctcggtataaaaaaccgacagtgttcttgcggtgagcgggtttgaaagattttttttaagggatgatgcggcggcaagcttaagctcgcgaagaaaggcgtccgcctcgacccgatttttttcaaaccgcgatgtcatcttcagcattccgagttcatcggaagcaagcaaaagacttatgaattcctctgcggcagctgccgccttatcggaagaacccgaaagataagccagcgcaacgcctatatttcctcccgcttcccggagtgcggagcttatccgttcgggggggaattcctcacccgccgcaagatatttttccgcctcggaaatttcgggcggcgagagcgaaaacaccgtgcagcgcgatattaccgtatcgagcagcgccgccttgttttccgcaatcaaaacaaaaagcacggagccgggaggttcctcaagcacctttaaaagcgcgttctgcgcctgctcgttcatggtatccgccgaatctattataaaaacgctgcgaaccgacatatgcggctttacataagcatcacttctgagcgcccgtatttgggctacggttatattctttttgccgtcctcgggggcggtcgtgtgaatatccgggtgtgttcccgccctttcaaggcggcagtctcggcactcgccgcagggcttatcctccccgccgcataccgcggcacaggcaataaattttgcaagggtgtgccgccctgtgcccttatccccctctatcagcacggcatgaggcagccggtcggctttgattgcggcggtcagcgcgttctgcacgccgctgtttcctataagcggaaagctcatagcacgaacccgacctttttcattgccttgaagtaggttttgcgggcgatgtattccgccttttgagcaccctccttataaaggcgctcaagctcttttttatctccgattatctcatcatgccgctgctttatcggggctaaagcatcagccactgcttcgccgacggcaagcttgaactcgccgtagcccctgcccgcaaactcgcgctcgacctcggcaaccgatttatccgtaactgcggaatatatcgttataagatttgaaacgccgggcttatcgtcggacattctgatttccgagcccgaatcggtaacggcacgcttgaatttgcggattatcgtatcgcggtcatcaagcaaggcaacccaggcgtttgcgttgtcgtccgatttcgacatctttttcgagggatcctgaagcgattttattcttgccccggccttcggtatatatccgtcgggcacggtgaaaacatcaccgtaaatattgttgaagcggatagcgatatcgcgcgcaatttcaaggtgctgcttctgatccgcccccaccggcaccagatcgggcttataaagcagaatatccgccgccataagcacggggtacgaaaacagaccgacatttatattatcggggtgctttttgcttttatccttgaattgggtcattcttgacatttcgccgaattgggtatagcaggaaagcagccacgaaagggcggcgtgctcgggcacctgcgactgaatgaatacggtatttttttcggggtctattccgagcgccaaaagtatggcgtaggtggaatatatctgactgcgaagctttgcgggctcctgccgcaccgttattgcatgcagatccgcaacggcaaaaaagcaatcgaattccgcctgcattgccgcccagtttttaagcgcgccgaggtagttgccgagggtaagcatgccgctcggctgtatgcagctcaaaacacgttttttagcttccgccgaattattttcgcacatattcattccgcctttaagaatcagattattcataaattttattttaacacacttttcttcaacttacaagtttttttaaatgcgttttattctgtctccccgcgtgaggacggcataacgaaccgtaccgcggcatatccttctattaaaggagagtgttccgctttgaaaagaataatatcgttgtttttggttgttttgtgtatcggaggtgtgactgtttttgcaaagggcgctgtcacggtatcgagcgaatgcgatatctccgatatcaatgttccgctcgataacaccccggtaaacgccgccataggtcagacgctggatataaaggcaaggtcggcggtgcttatggagccgaataccggcagggtgctttatgaaaacaatcccgatgaaaagctgccgcctgcttccattaccaaaataatgtcgctgctgcttgttatggaggctattgaccgcggagatctatcccttgaaacggtggttaccgcaagcgagcacgccgcctctatgggcgggtcgcaaatatggctggaacccggggagaccatgaccgtgaacgatttgcttaaggcttcggtaatagcgtccgccaatgacgcctgcaccgcgcttgccgaggcggttgcgggcagtgaggagggctttgtggcgcttatgaacgagcgcgcggcggagcttggaatgaccaacacccattttaaaaactgcaccgggcttgatgcggaggggcatttgacctctgcctatgatgttgccgtaatgtcctccgcgcttataaagcacacgctcataaaggactacaccaccgtttggatggatagcctgcgcgacggcaaaagcgagcttgtgaacaccaataagcttataagattttatgagggcgccaccgggcttaaaacaggtaccacctctaccgcgaaatactgcgtttcggcaacggcggagcgcaacgggctggagcttgtggcggtggtaatggcgggcgagactacaaaggagcgctttaacggcgccaaaaagctgcttgattacggctttgcgaattacaattattcggttataagcgcggacctcggggatacaaaagagcttgatatagcaaagggaacgaaaaggaaaattgcaataagcgcggaaaagcaattaagcgttttgctgccgaaaaccgcaaagggaaatattacgcaggaaataagctttaatgaaaatataaccgctcccgtaagaaagggcgcggcggtcggcacagtaaccgtaaagctgggcgacgaaaccctgggcgaaattcccgtaacggcggcggaggacgtggaaaggctctcactcggcttctcgctgcggcggattttaaaaggattatttcaattatgaaaacttttaatgaatatcgcttttcgcacttgaaaaagtcggggatttattgtaatatataaacaggaaactaaaatttaaagaatccaggggttaaaatggctattaaatttaattcggcgtatgccaaacagttcatcagggaaaatgatgtcaagggtcttgaagcgcaggttgctgcggctcacgggcttgtaaatgacaaaacaggtctcggcaacgacttcttaggctgggtaaacctgccagtaaattacgataaagaggagtttgccagaatcaaagcggcagccgcaaaaatccgcaaggataccgatatcctcatagttatcggcatcggcggctcatacctcggtgcacgtgccgctattgagttcttaaaagggccgttctacaatcagttaaagggcgagggccccgaaatttattttgccggcaacagcataagcggcgcatatctttcggatattgtaaagctgtgcgagggcaagcgcgtttcggtaaacattatttcaaaatcaggtaccacaaccgaaccggcggtagccttcagagtcctgcgcgatctgcttgaaaagcagtacggcgaggaagaagccgcaaagagaatttattgcaccaccgataaggcgcgcggcactcttaaaaagttagccgacgaaaagggctacgagtgctttgttgtaccggatgatgtgggcggaagattctccgttctcactgctgtgggtcttttaccgattgcggctgcgggtgcggatatagacgctcttatgtcgggcgccgcggcggctatgaaggattacaacgaacccgatatttataaaaacgactgctatttatacgcggctctccgcaacgcgttttaccgcaaaggcaaatcggttgagctgcttgtaagctacgagccccgctttactatgatggcggaatggttcaagcagcttttcggcgagagcgagggcaaggacaacaagggtcttttcccggcctccgtcacattctcaaccgaccttcactcaatgggtcagttcgtacaggacggcagccgcttaatgtttgaaacggttgtaaccttcggtgaaagcgataaggacgttgtgattgaagaggacgcggataacggcgacggtctcaacttccttgccggtaaaaccatgtcatatgtaaactcaaaggcatttgagggcacggttttggcgcataccgacggcggcgtgccgaaccttgttataagcgttgataagccggatgaagaaaacctcggcagacttatttacttctttgaaaaggcgtgcgcggtttcgggttatatgctcggagttaatccgtttgatcaacccggtgttgaaagctacaagaaaaatatgttcgccctgctcggcaagccgggctatgaggctcagaaggcggagcttgaagcgcgccttaacgggtaaaaaagctgctgcaggcagttaaatataaaaggagttggtataaatgattaaactcattatcggaaaaaaaggctcgggtaaaaccaaaaaattagtggatatggtaaatgccgcgacagaacaaagcctcggcaatgtcgtatgcattgaaaaaggcgataccctgacatattcggtaacacacaaggcgcgtcttatcgacgccgagagttacggcatttcgggctacggcgaatactacggtatggtagccgggattaaggcgggtaataacgatgttacacacattttcggtgatgcaaccctcagaatcggcgagcgcgattttgataaattggcagccttcctcgaaagagtttccgctatttcggacgttgaatttattttcaccgtttcggctgataaaaaggagctgcccggcaagatttttgatatagccgaggtttgctgaaaataaatcaaaaaacgtaaaaacggatctgccgtttttgtcctcccccctgcctgcgggcaggggggatttttttcggctgccgcctcggtcggagccttttgccgccgtctgagaaaaaacaaaagtgcggcgtttccgccgcacatgcatgggaaaaacgaaaattgcggcgtttccgccgcaaaagaagctttgatattatcttctggtccaatgtccgtaatcagtatttccgtatttccaggcttgcgtcgtcgctgcccttttcaatcgagcgtatcacaatataatatccgtactcctcgtccaccctaacatagacgcggtcgcccgtctttctgcccataagtgccttgcccatgggggaaaaccgactgataagcctttcgagtgaattttgcctgagagcggttactatgcgaaccttttcgaccgcgtcatcctcttcaacatagtattccaccgtatcgaatattcccacctcatcggggcggctttcggggtttataacctttgcggttttaatcatattgcgcaaataccttattcggctttcgtttttgccacgctcgcgctttgcggcgtgatactcggcattttcgctcagatccccgaagctgcgggtgaatttgacctcttccaaaattttgggccgcactaccgtaatgcggtattcaagctcctccttcattttgtcaatatcaaccttggtcagttcgtcatacatagcaatacctcaattttaaaacgccccttgccgttttttcggcggggcgtttttatgtttattcgaattttgcctcttccgtttcgcagctttcgtttttaacctcaacggttatttcgtgggtcataatatcatcggccttggtaacggtgatgcaaagatttttatattcaagcttataacctatttccggaatagagcccgccatctccgtaagccagccgttcactgtggtggagtcggtttcaagctcatcatcgtcaatcgagaagaattccttgaaatcctcaattgaggcggtggaaagcacgcgataggtgttttcgccgatttttgaaaactcggttatctcctcatcgcgctcatcccatatttcgcccaccaattcctctaaaatatcctccattgtgacaattcctgcggtctcgccgtattcgtttaccacaatcaccatatgggtgtgggtcttctgcatatccttgaaaagcgaatcaaggcttaccgtttcgggcacatattcgggttggtgaagcatggatttaagatcaaaatcaggctctgtgcgctttattaaataatcgcgggtgtgaagtatgcccactatatggtcgatatcgtcatcaaagacaggtatgcgcgaatagccttcctcgtcgataatttccattatttccttatcggtgctgtcaagcgagacggaaactatcgatttgcgagaggtcataacattttctgcggtaagcgtatcaagcttgaaaacatttttgatatactcaatgtcgttttcattaagcgagccttcgtccgctcccgcgtcaagcataagcacaatgtcctcttccgaaacgggttcatccttctctctcggatcaatacctataagccgcagcaccgcgtttgtggaaacggttaaaaaccagattataggtctcagcgccgccgccaaaaacgaaataatgccgcaaacgccgtttgcaagcttttccttgtgcttcatggcgattcttttaggaacaagctcgcccaaaataagggtgaaatatgaaagaataattgttataagcactaccgatacggtattgacggtgcttgtgtacttttcggaaattgaaaaggtcttaattatttttgccgaaaagccctcggaaaagttatccgccgcaaaagctgagcccaaaaagcccgctaaggtaatgcctatttggatggtggaaaggaagcgcgtgggctcctcaattatcttgagcatttttgcggcttttttatcgccctcttctgccagtgcgcgcacctttttttcgtttatggatattaccgctatttccgtagcggcgaaaaacgcgttgagaaaaataagaataagctgtaataacagttgttttaacatttgtaagaatttacctccgtttttaattcataagtcttttacccgttttgtcagttaacattgcgcatttggcgccgggcaaccgaggcatgaattttatacgcacggtaattctttaaatacaattccctgctacttcggggaagcggatccacaaaaccatctccttataatatagatacatttaattatacatacaattcggtaaagaaacggtaaagattttattgcaaattcccgctgcttggcgtataatggttctggggtgcaggatatgagcaataataagtttaaaattttgacggttgatacggatataaaggcgcaaagacgcttatcggagctgctcacgggcgagggctataaggtaatatcggcggcaagcgatgccgaaacggtgcttttacttaaatcgcatatgcctgacattgttatctcggagcttctgccgccgggtacggacgggctgcgctttataggcaggataacagaaataaccgatgcgcccataataatcctttcctccgaaacggacggcaatattaaagcggcggcacttgacgcgggagcgagcgattatgtaacaaagccgtattgcgaagcggagctttcggcaagaatacgcgtgtgcctccgcaacagccgtgcgtttaggaattccgacggcagcagctttaaaagccgcacgctcacggtggattacagagcgcggcgcgttttttcgggtgagggtgagataagactcacgcagaacgaatacaatatcttggcgcttttaaccgcagaaagcggcaaaatgcttacctaccgcgaaattataaaggcggtttggggagattaccccgacagcggcagcattaaaaagctgcaagtgaatattgcgaacatacgcaagaagctcggcagtgcggatattattaaaaatcaggcaggggtcggctatatggcggatgacggttccgcaaagcaagattaatattttttgttctgcagcgccacttcggtattgtatatcgcctgcaccgccgccttatcggagtttattactatatatgtatatatggcatcgaaaatggtaagctgagcaattcttgagctcattccgagtattgagtgctttgtttcatcggattttgtgaacagcgctatatcagacgcctctactatggggaaggcggcgtagtttgttatacatattgtggcggcgttgccgattttcgaaagctttaatgcctctacaatatcctttgaagaacccgagtgcgatatgcctatcgcaacactttgcctatccaaatgcgaggcgattattgcctgcatatggttatctgtgcagctctgcgcgttaagcccaagccgcaggaatttgtgcgcattgcctgtatggttaaaaactttaagggcatgcgcataggtcaggtaggaacacgccccgcgcccttcttctcggtcatatggaacgagggcgagctgatggagaaattcggcacgctcaatcctccgcagcgctgttttgggaacggttatattcttccgcggtaataagcatactcgaaacggcgtacagtgtttgcccgttgtaggaaaggcgcgtccagcccttgccgccgttggttgcgaggcgttcggcaaattcgccttttttcagctgacaaactatattatcctccttaccgttcggagaggaacgcagattgacaatatcctttgcggtcactttgccggttgccgcaacaaattcatccgccgtgctcggcgtttcactgctcgccgcaggctttttaacctcggttgtaaggaggcttgttttggcgtaaaccgtttgcccattatataaaagccttgtccagcccttgggactttcgcccgttttttccacaaactcgccgtttttaattgtggctatcagttttccgtcagttgagggctcggcgcgcagatttgtctcgtccttagccgtaactcttcccgatgctgcggtaaaaccgtcatccggacgggtttcaggcgcttttgcgcttaaatcagcagttaaatagcttgttatggcataaaccgttttgccgttgtaatttattttagaccagccgtttgagcctatgcccgtgcggtttaaaaccgttccgtttttaatatttgcggcaacatcgcttttggtggtggcggcggtgcgcagattcacctcaatttttggagtgaccttatcgctgaccgcggtgtaaacgccgtcttccctgctcggcgcggcggcagtgcccggtcttgccgatttattcttaggctccgccttttgccttgtgaaatacgctaccgacatatccacatttccctcaattcccgcaacggtgccgttatcggtatattgccacatatcgtatttacccgaataatcggggtgggcggttttggggtacggctccgccgggtagcgcgccacccaaaccgaaaaagcgttttcgagccttgcggtatcccagtaagcggagcctgacagctcctttacagaggaatacagcataccctcatagccctttgccttaatgcggttgagaaaagccagggcgttatttgtgcgctgtgtatttgtaacgccgtacattcggctgtccggctctctgaagccctcgcaatcgtataccacggggtaagaaaccgaatagccggcaacagcggcggcagtgaagtccgcttccgcctccgcctctttttcggaaagcgcggtcgagaagaaatataccccgcaaagcacacccgctttttcagcctgctgcaggttataatcggcggcggagtccttataaatcgttccgttttcgccgcggaagcctattcttataatcgcaaaatctatgccgctttttttaacgcggctccagtcaattttgccctgccattttgaaacgtctatgccgtttgccctgccctctttgacagtaaggctttcggtgtctgctttcgcgcccttttcttctgtaatatcggtgttttcggggtcctgcttatcgtctgcggtaagcgcctctgccgtcggcgcagacattgcggatgagctttcggcagccctttttttacagccgcaaacagaaagcagcaacgccgctgccgccaaaaggcataaaatattccttgattttaacttcataaccgcgtccctccatataaataacgaaaaagcgttaaaaagaggttacaaaaaatcagtttttgcccgaaatgcagtcggcaacgtaaatacccatagcgcccgattgcgataagccgcggcagataccgctgccgtcgcctattatatatacattatcggtgagctcaaacttttcattcataaataccgggcggattgagtaatacttgctctcgcagccgtaaagcaacgtatcgtcattcgcagtgcccggggccaccttatcgagcgcatagatcgtctctataatatttgtgagaatacggtgcggcagcacaagcgaaatatcgcccgaggttgctttaagcgtgggtataacggtattctgaccgagcctgtgatcattagtgcgcctgccgcggacaagatcgccgaaacgctgaacaagcacattgcccttgcctatcatatttgcaaggcgggatatgctctcagcatactctgtgggctgatcgaacggctctgtaaagcgtatacttgaaagaattgcgaagttgcagttgtctgtcttcttcgcggggtcggcaaaggagtgaccgtttgcagttatgattccgtggttattctccgccgaaacaagcccgcccttattaaagcagaacattctgcagcggtcctcaaaggttttggttctgtaaagaattttcggctcgtaaatacggtcggaaaattcgcgccagataatatccttcatttcaacgcgaacgcctatatcaacataattcgagcgcattttaacgccgaacgagcggcagaaatccgcaacaaagttagcgccgccgcggcctgttgctattattattttttcggcgtcaattttctcgccgttggtgtagtaaagcgtgtagccgccgtcgtgcttttcaaccctttcgcaatcgtagaaagcgagcatttcaaccccgtcgtcagccagcgcgtgaatgaggttttgcattgtgaggtagtttttatccgttccgagatgctttacattcatatccaggaggcgaagattattctgcagacacttaagcttcaggctctcgtttgatttataaaccgtaggctcgcccgaagtgcagtattcattgaggatcttatcaacctcattaatatatttattcgcggtatcatcgcccaattcttcgcccagcgttccgccgtaggcggtgccgaggttgaacttaccgtccgaaaatgcgcccgcacccgcatagccgctggttatagagcaatgcttgcagtgaacgcaggtgttgtttttccctgcggggcagtgcctgttttcaagggtattgcctctttcggttattactattttaatatccggtatattgcggcaaagcctgtaagccgccataaggccgcctataccgccgccgataatcgcaacatcgtatttaaagttagacatgatccgctcatccttttaatttcattacacagaaaatcaggctgtattctcccgcttcggaaaacacagcctttactgcttatctattttataccataagcccgcatttgtcaagctattttatgcttggcagacgataactgcctcacttgtgttaaacattagatattagatgttggattttagaaaatacccctcagtcactaacgtgacagccgctgacggcggcggtcccctctgttttgacatacgtcaaaaagaagggagcctatgggttggttattttatgctttcgtcctttgcgaccttttccacgtgctttaagattttattaagcgccgaggaatttattttgcccatttcaatgccatcgatgctgtactgatatttagccgcgcccgactttataaatttaacgtcggttttggcgcgcgaggtatcggaataggtgaaaacaattgtcatggcaggctcgccgctcaccttatccaccgtgaaatccgagcaggaaagcgaaatgcattcctgatagaaattctggaagttttcggcggtgagctttttgccctcataggttataacgtaggtttcctccgcatcttcggcatcatcataaactatatcaaagctataagtcttttcgggggttttgacagtgaaattggaaagctcgttaatagattgcaggcagacccacgaggcgtagtaattattgaccttgtaatcaataaaggtaaggcttgccgcgtcaatctttttaataagctttgcgccgtcgtaccaaaccgcgtagccgccgtcctcctgctttttaaagctgtagctttgctttacggaacctaccttaatttcagcggtaagctcgggattatcaagccccagctttttgcgggtcgagacggaggtatcaaacgaatacgcaccgctcacggttacgccgctcttgaaaagcccgaaaatgccgtccacattatcggcaatgcgctttgtgggcgaggtggtcatatacgccgcataggttgaaaggtttttatcggtgttcggcgcaattatcagcttttcggggaaattagagcccgtaagggttattgaatcaaaggatgaaaggtcgccgttatcatccttataatctgaagataaatcggaagtgggcacaccctctatagaatcggttgcggcaaggcttagggcgtcaaattcaagcgacgaatcaatcgagctgtcgttaatatatatcttatcgtcggtagaaagcttgatatatattcccgtaccatcgggcgattctccgcctataagcagggaaaattccgcgccgtcctttgttacaaaatcagccttgaccgcagggctttcaagcccgcattcggcggcggattttgcagtaacctctcttgaagcggtaacgcttgcggcagagcttacaatgcttgaaacggatgaggaatttattacatccttcgcataaccgtcaagataccataccgttttaacggtgctgcttgatgcagcagaggatgaggacgaagacgagctttcttccttttcctcctcggaataaagcttatatgttccgcttttattggtaacggtaacggttttaaaatcgtccgagcttttatcgagcacctttatttcctcaattgagggggtagaggtatcgtcctcgcgctcggggataagctttattacggcaaccgttccgcccgccagcaccgccaccgccaaaacagccgaaatgattatgggtaaaagccggcgtttttgctttacggcggtctttttgtggtcggcggggtcggagaagacggtggaagcaccgtcctcctcgtttgaaatattttccgtattttcgtttaaattattatccttttcgggaaggtcactcattacgcattctttctcctgataaagatataaattcctgcggcaatgcacgccacgggcagcagccccataaatataattctcacaattcttgcagaagtctcgcttaccgaatccgcgaaactttcgttggttattgttttagaaacaaatgagattccggtatcctcggcacccaccgcgcgctccgcgcaggcaagggtaaggtttttattggaaaccgaggactgctcgttatattccgactgaataaactgaacgctgtcaaacgcgaaaacatagcttgttatctgcttattgtcgtcgtcatattcagactgtgccgcctgaagcaccgcggggaagctctttttggtgtagttatcggcacccttccagtttgcggcggtaccgacaggcgctgccacaaccgattcaagcgagctcataagcgaggttacggttatgccgttttcgctttcaaatgcggcggacatgggaacattgtagcctgtaatgcaaagctgcattccgcttgtaaggctctcatcgctgcttgatgggtaaattcccatcgtcatcgggtcatccggcatatgattgtttgaattggtttcaaacagtattccctcttcaatcgcaataccccattgacttaagaaatcgtaaagattggtaagatatggggcggaagcgtccgcaaagaacagaagacccttgccgagcttgccgtcgttatcgaggaagtcggaaagattatcaagctcgctgcctataaagtcggtggtaggacccgcgattataaccgcgtcaaaatcggaggatattttacccacgatattatcggaaatcgtctctatttcgtagttgttagcctttaaaagcttctgataatcggctgtgtagtcggtcttggaatgccccgtgagcagcgcgaccttctttgttttgctgcttgttacatacgcaatggcgcttgtaaccgcggtttcaacgctgtttccgctgacggttgactggctgtagccgtaggcggcgtaggtgttgtcttcggaaagctgataaacgtccttaaagcccaaaaccttgtagcgctcgttattatccgagcctttagccgaaacgattatatcgccgtaggctaacttttcgttggaatatttctgcgatatctcggtaaattccgagccttgagtatcaacatatttcaaggtaatattgttgttgtatgccgggtatttatcaagaagctttaaggtctgctcgaaatacttcgacgcgtcggacgatacgccgtaaagattctgcgcgtaatagcccatatagccgccggtatatccgtccttttcggcgcaaacggttatatttacttccttatcaaggtcttttaaatatttgatattgtccgcgctcattgagttttccttttcggtggacatatcaaattccaaaacaaaacggtttgaaagcgcgtttaccaatacgttcagcacaataagccccgcaagcactgctgcggttattgcgaccgaatagccgcccctgcgcaaaagcgcctggtttttaagctttttaggttttttcgcctttttttcttttttggctttcttttcttttttatcgccggtctgctctgcggcggtctcctcggcgggtgtattctccgcagcagtttcttccgcagcttccgcttcgggagttaaattcttattttcttccattttgctcaccctcctttaagcccatcttctcttatcaagcgagcggacgcacaggaataaaaacgccgcgcttatgcttacaaagtagagaatatccgcaacggacagtatattttcgccgaaattttcaaaggcgcttataaacgccgccttttcaaccaccgttgctatccaggaaacctttatcatgcttgcaaagttggacatataaagcacaagtatattgattacaagggtgagtatagcagaaattaccggactttcggtaagggatgatataaacatgcctattgaaataagtgcgcttccgagcagcagcataccgaaaagtgcgtatatatacgacatcacattaacgctgacatacgacgctacgattatttcaaaaataaccgtgggcgcaaagccgattgcgaaaaccgcaagcgccgcgaaaaatttgcccagcacaatggatgtaaggctaacgggcgccgtaagcagcgcctggtctaccttttgccgcctgtcctcgctcataaggcgcattgtaagcaccggcatggtgaaaacaataacggtggacattgccactattaccgttgcggtgtccgggctgccgtagctgtatatcattgaaaaatacagccccaaaaagaagtaaaacgccgctataacaataaagcctatgggcgttgtaaagtacgccctgaattctcttttaaataccgcgctcattgctctgcctcctctgcctgctctgttttgacggtaacgctgccgtcatccgctatttcaacgctcggtttttccgccgtttccgttttatcggttattccgagcatacgctttgcttcatcgttatcggcagcttccgtaagccgcaggaatatctgctcgagggacaccttgttgctggtaagcgataaaagggtcttaccgcgggatactatacgcttgaaaacctcggcgcgcacatctgcgccgtgctcgggctctataaggaaatcgaacgagccgtcctcttttctgccgagggatgtaaccgattttacacccttaacggtgcttaaagcgtcaatcatttcctgttcgcccgctactatgcgcgcaataagggagtgatcgctcgacagcttgtttgaaaggttttcgggcgtgtcgtcggcaattatctgccccttgtttataattattacccgcttgcataccgcctgaatttcggaaagtatgtgcgaggacagaataatcgtgtggtttttaccgagacgggctataagatttcttatctcgattatctgcttggggtcaagaccgacggtcggctcatcaagaataagtacatccgggttgcctataagcgcctgggcaaagcctacacgctgacggtagcccttcgaaaggttctttataaggcggttctgcacattgtcaattttaacaagccttaaaatttcgtcaatatgcggttttttcgggaatttaacctttttaaggtcataaataaagtttaaatactcgcgcaccttcatatctgtataaagcggcggtatctcaggcagatagcctattctgcgctttgcgtcctcggggtattccgcaatatcgtacccgtcaatctccaccttaccctgtgtaagtgaaaggtagccggtaagtatattcattattgtggacttacccgctccgtttggacccaaaaagccgataacctcgcccttttcgatgctgaagcttacatccttgacggcgagataagtaccgtaccttttgctgagcccggttacttcgatcatttatattcctccaagcataatttttggttctaaaccataataccaaacaaatttacaaaattattaaacaaattgtgaataattgcaattactacgccaaaagctgcgccagcgttataaccgcaggcattgtaataattgacagaaccgtgctgagcgacaccatatcgaccgaaagcgccgtatcgcccccgccgaattttgaagaaaacatcgttgtgactgccgcaaccggcgcgcttaacgatattattacggaaaccagcagcgttccgcgcacccccaaaatatacaaaaccccgagggatacaagcggataaacaataagccttaataaaacggcaattatgcacttaacatccttaaaagccttaagcacattcgttttgcttaaatggtagccgataataagcatgggcagcggggtgtatattgccgcaagataatttacggtagatgaaagcacatgcggcacgggaacggaaaacacgaaaattataagccctataagcagccccgcaatgccggggtttacaaaaagctttttcggctgtatgtagcgtttatcgccgcttataaggtaaacaccgtagctccacaccacaaggttgaacattataacataggcagagccgtaaagcgtgccgtcagaccccagcattacctcctgcagcggcagcgacataaacccgcagtttgcgaaaatcgagccgaagcgcagagttcgctgccgccttaagtcctttgagcgaaggagcagcgtaccgagagtaatcataagcacctgcaccaaaagggttaaaacaacagccagcagcagcgatttcataaccgccgcgtcgaacctgcgcataagcgattttataataacgcagggcgttgctattatcagcgcgatatcggtgcagcaggcggctcccgcctcggtcatgattcccgcctttgccgcaataaagcctaccgctatcataagcattaaaacggagacctgggtgaaaacggttatgaacatttatttactcccgcggcaaatttcaggaatgctcgtcttccctcctcggtgcgcttgaaaacacctgcgtgctcaagcacatgtgagaatacaagacctatttcgtcccttattatttcgctgatattgtcttccgtcagctcgccgtattttcggcgcacttcgtctgcccaatcggcatgctttgcaagcacctcgtcttttcgtatatcgcggttttcaagcattgccttttcaagcagcgccatttcgtttttaaggcgcgccggcagcaccgcaagacccataacctcaataagtcctatattttcctttttaatgtggtgcagctccgcgtgcggatggaaaacgccgagcgggtgctcagccgtggtaatattgttgcgcagcaccagatcaagctcaaatttaccgtttgcctttcttgctatcggggttattgtgttgtggggcgtgccgtcggtttcggcaaatataaatgcgtcggggtcggaatatccgcgccagcaggtaagtattttatcggcaagctcaactaacctttcggtattttcagagcgcaggcgtattaccgacataggccactttacaattcccgcctcaatatccgaaaaaccgtcaaaatgcagctcggtttcaatcggtgcctttgccattgcaaaagtgtggttgccgccctggaaatggtcgtgacttaaaatcgagccgcccacaataggcagatcggcgtttgagcctacgaaataatgcgggaactgcgttacaaaatcgagcagctttttaaaggaagcgcggtttatagccataggcgtgtgctttgcgttaaacacaatgcagtgctcgttatagtaaacatagggcgaatactgtaagcaccagtcgctgccgtttatcgtaatgggtataacgcggtggttctgccttgctggaaagtttattctgcccgcgtacccctcgcactcgcggcatagcatacatttcgggtagcccgcctgcggcgcatttttggcggcggctatcgctttcgggtccttttcgggctttgaaaggtttatggtaatttcaagctctccgtagggcgttgcagtcagccacttaatgtcctttgccacgcggtagcggcgtatgtagtcgctgtcccggcttaaagtataaaagtaatcggtggcagccttgggggatatagcataaagctccttaaatttatttgtaacctcgctcggtctcggcattaaagcccccataagctttgtgtcgaataaatcgcggtgagtaatgtcgttttccgtcagtcccttttcggcggcgtaatcaagcagggctttcagcgtttcttcaaggtcaacatccgaaaaaacggtatcgcagttatattcgtcaagctgcagaatttcaagaatacgattggtaacgtatatctcgtcccgttctgtgaaaagtcctctttcaagcccgtagcaaactaattttctaacctgttcgtctatcattttttatcagttcctttactgaaaagtaatattgcagcctatttcctgctgacaggcgttaagccccgccgccacaatcgccttggttctctcgtaggatttagccgactttgtcgccgcggtgcccgtaagtccgaatttcgccgcgccgtcgtttgcgctttcaagcgggt

SEQ ID NO: 4574 - DNA, 2241 bp, Unknown
  16S sequences of unknown bacteria
aagctgtggccgtggaggtcacgctggaagtctatgaatttcttgaccgggccgaccacaagaccgagaacctgttccatgagcagcggcggcactgggatggccgggagtttgacgagtacatagttgccaccgagggcgtgggtatctacggcgaaacgctggaggactacctttgccgcatggaaacgctgggcgagctgatggccgtcctggatacctgcaccgaggcacagcgccgccggttcctgctctatgccctggacgggctgactttttcggagatcgctgccctgtgcggctgctccaagagttcggtgcaaggctccattgaagcggtcagaaaaattttcaaaaaaattttgagaaaccacccatacgaatgaccccttttcgggctaccaggtgaaagggattgtttcccttatcccagcgggaggcggacagcggacaagctgcccgcctctcccattttcaggaggtaagcctatgaaaaccatcaatctgcggtggatttatccccactaccggcacgacgagtttgtagaggtcagtgacgaggtttgggaggccatgcggcaggcccagcgcgagatgaacaactatgagcgccggaaggtctaccaccgcgcctggtactccctggacgcatatagctgggcggagaactacgcgctggaacacggcagatcgccggaggaaatccttttggagcgcgaggaacgggccgcccatctgcggctgctggccgccttgccggaagccctggcccatgccaccccgacacaggcccgtcgcgtccgggcctactacatcgccggtatcagccagccggaaatctcccggagggagggcgtagacagcagcaaggtcagcgttgccatccggcggggcctgcggaatatgcgccgctgctatgactgccttttcccggcagagtgagggcgggcctatgcagacgatcaacctcaaacagtattacccgttctgcaccgaggacacttttgtggaggtgtcagatgaaatcgttgaagcgttcctgctggacaagcgggccgaggccgccagggagcgcaagatgtaccgctacaaggcgttttactcccttgactgcgatgatgggattgagaatgccgccatcggctgggcgcagccatcgccggaggattgcctgatggaaaaggaggcgcaggccgaatatgctgaactgctccggcggctctatgaggccatttcctctctgaccccagcgcaggcccgccgcgtccatgcccggtatatgctggggatgaaagtgaaggacattgccgcgatggaaggtatcactccatcccaggcggggaagtccatccatgcggcgctccggcggctgcgccggtacttcatgcgccggaaatggacaagcggcctatgaaaaccatcaacctgaaaaagtattattaccccctctacgaaacagacaccttcatcgaactgccggacgagatcgccgacgccatcgcggaggaatggcgcaccgaccacaactccgagcagcggctatggagccatacttactcgatggactattcccccggtctggaataccacctgctctctcatgccctctccgctgaggacactctgctggaagaagaaacacgccgggaacaagaagaagcccatgaattgatgttgcagcggctccgggaggcccttgccaccttaacgcccacgcaggcccgccgcctgcacgcccgttttgtggagggcaagaagtaccgggagattgcggaggacgaggggattgccagtgtgagccttgttaccaataccgtccgggacgccattttgaaactacggaaatattttatcaagcgcggctggatggagccgctgaaggaggacgcgatatgcacaaagaaattaccgcccaagcgaaacagaaaaaagacgagcgcgaagaagtcctgaaggagatccggcagcttgagaaccgccagaagattttggagaacaagcagcgcaatgaggaacgcaaggcccgcacccgccgcctaattgagcgcggggccattttggagggcatttttcctctggcctccgaccttcccggcgtagaggtcaaggcgttcctgattgccctgtcccatcttccgggggcggcggaactggccgcaaaactgccgaaatccggggacaagccgtaagtcccttgtttacaagggcgcacttatacaccgttgccggtgtcgtgcgccc

SEQ ID NO: 4575 - DNA, 6552 bp, Unknown
  16S sequences of unknown bacteria
tcgccttagtctcgtgggctcggagatgtgtataagagacagatcccgtcattcgcttttggtgcagcaggcgcttgatgtcctgtccctgcctttcatagaggctcatccggatgctgttggatccgatatctatcaccgcaaccatcgaaaagcctccttatgcattcaaaagcgtcgcctggtattccttggaaagatccatcaaatgctgtaaaaacgcctggtaataagggcagtatgcctggttttggatgcgcgacaggtttttttcgatcaccgcctgctccctggctttatcaaaaataggcaggccctgctgctttttgtaggccgccacctgttctgccgcctgcatacggcgctcaaacagcaccgccatctgctcatcgattttgttgatctctatccttgcttgctctagttgattcatgcgtatctccccatcttttctatttctttatcgcaaaatacctcaacggcgtaccggcctgtcatggcatcccgcttggtataatcaaacacggcgatgcgaaacggctgatacagcagggcgacccccaatttcccctgccctggccttttctgcctggccttggcttttgcatgctttagccttttatcctctctgcgcagcaagggaggaatgcgccccgtgttgtcgcagctcaatcgatctatcaccaggcagtcgcgcagccgctctgcctgtacgccctcctggccggcaaaaaaataccagatccactcggtgtagagatccagcgaaacgcccgccgtcccctgtgccgccgcatacctcccaaaggcttcaaaaagggcaaacggcgaccatcccgtggcttgcaaaagatagtctaacgtccgcaaaaaccgcccgctgttatacatgcgctccagtgcatcctccacttcgtgcagctttgccaggtcatccggcgaaagccatcgcgtctgctgcacctcatagggcgccagctctgagaactggtagccaaaatccgcccgcgtttctgcctggcgtctaagcttcgaaccgtacagcagcttcaaaaagcccagctgcagcatgtgcggccgcagcgcaaacgcgctgttgaaggacgcagcaaaggtcttataatcctcatacggcagccctgcaatcaaatcgatatgcacatgcacgttgtgcggccggatgcattgccgcaggttttccgtcagcacggtaagatcggttttccgatccaccgcctccagcgttgtctcgcaaaagctttgcagccccgcttctatctggatcaatcccggcggcgccgtggccaaaagcgccaaaaagcgaggctgaaacaaatcggcgcctacctcaaaatgaaagcacacgtcctcaggaaaggtctgtccgcgctgatccaaaatgaaagatagcagctcgtatgccctgtctggatggcagttaaaggtgcggtcgataaacttgatggtcttggcgccgctgttggccagccgcaccaggttttccttggcacgctccatttcaaaaaaccgtaccttttccttcacaccagataaacaaaacgagcaggaaaacggacagccccgggaggtttccaaataggcaatgcggcccttgagcctctccatataggcttggctgtatgggtctggcggcgctgcgcgcaaaggctgggccggcatcagggaaaccgcgccgtgctcatctctggctgccaacccgggaatcccagccggcgtccgcttttccgccagggcctgcatcagcgcaggaaagctctcctctccttctccgcaaagcacataggacacttccggccattgagaaaggatctctgccggccggaatgttacctccggcccgcccagcaccaccgtaaggccgggccgctgtgcctttaggcggcgtatcacctgccgcaccatgcctatattccaaatatagcagcaaaatgcagccacttcgagtgagttatgtaaaatcttttggctaatctcctccacactttggttgatcgttccttctaccaccgatacttcgcatgtctctatcccctccatggccgcggccaaataccatggtgccaaagaggagtgcacatatttggagttgatgcagcacagtgcgatcttcatgcccttttccgccctttcttgcttttctgctgcctattatagccttgccctgcatggccgtaaataaaaaccggcataggaaattcctacgccggttgtttgccgctttggctggcttatttctcttccaggttggtctcgccggtcttgggcatgcctttgggctctaccttccaggctttgccaacgccaccgaatatttcgatgagctctttcagacgagctttccagcccttctggatcaggccccacaggccgtatgcgccgttgccgctcaaatcagctgcggtaacggtatcgcaggcagcacgcatcaggtcgttgcaaacgttgaccttgttgatacccatctggcagaccttgcgcaggttctcgtcgccggatccggagccgccgtgcagaaccagcgggaagttgccggttacctttttgatctcttgcaggcgatcaaagtggattttcggcgtgccgacataggcgccgtgcgccgtgccgatggcaactgccagcatatcaacgccggtctcttcgatgtattttttcgcttcttcaggatcggtcaaagcggtcttgccgtctacggcatagttgtcgccctggccaacatggcccaattcggcctctacgcttacgcccatggcgtgcgcaatcttaacaatttcgctaacttcctttacgttttcctcatagggcagaacagaacggtctaccatgacggaggtaaagccggcgcgcagcgcagacataacttcttcatagctgccgccatgatccaggttgatcgcaaccggcacggaggaagcatccgccaagcgggtcaagaagctgccgtagaatacgatgtccgggttggccgtgccgcccacatccaagatgatgggagcattcagctcttccgccgcttccagagcgcagcgcgcatccagctcggtgttgacgttcggggccgcaacgccgtagttttcagcacttgcgcggtcaaggatttctttcatggtcactagcatgacaatcactccttatataaatgttatagggttcaaaaaaatcaaacaattcatcttggttgtgtaagacaccttacataaagaagatatacaaaaactgtatatattataacagtaagccgccttaaacacaagcattttctttgggcccttgccctgggaaccccgctgttatggttgtacggttcccttataaatcaacgccgcattgcctgtcaggtatacggtttgttccgtatagcgaatgataagttcgccgcccagcagctttaccgtaatgtccgtatccttgtcgcaatatccgttctccacagccgccacggccgccgcgcaagcgccggtgccgcaggccatggtctcgccgctgccacgctcccatacccgcattttcaatacgttgggggccaagaccttgacaaactccacattcacgcgctcagggaacagcgggtcaaactcaaacttcgggccaatctcctccacatccagcgtatccacctggctgcaaaataccacgcagtgcgggttgcccatcgaaaggcaggtgatttcatagacgccgcccgccacctctgtctttctgccgatcacttgctcctccggcaaatttaccggtacttttgcgctttccaggcaggccgggcccatatctacccgtgcgcgctttacctgtccgttatactgcaacagccgtacggtcttgatgccgctgagcgtttcaatcgtcatttccagcttgttgacaatgccctcgtcatgcaggtatttggccacgcaccggatggcgttcccgcacattttgccctcgctgccgtcccggttgaacatgcgcatcttcgcatccgccacctcagacgggcaaatcagcaccacgccgtctccgccgatgccgatatggcggtctgccagctccacgctcagccccgccgggttgctgatggtctggtgaaaacagttgaaatagatatagtcgttgcggcagccctgcattttcacaaattccagcgtctccttttggctgcgcaggtggttgatgtccaccaattctgtgcttccctcggaataccggctcttcaggcagtccaaaagggcgctggccgtatccatggccgtaaggcatgggatatcgcgctctacggctttgcggcggatccttacgctgtcccgagtggggatgcgccctttgctggaagtggagatcacatattggatcttgccgctttccagcagcgttaagggattttgttcggattcgtggatcttatccaccacctcgacatccatccccgcctcgcggatcaccgctgcagtgcctcgcgtggcgtacagcgcaaacccaagctcctggaattgcttggcaatctccgcaatctccggcttatcggtatcgcggatggtcatcaaaacaccgccggtctttttcatctggtagcccgctgcgatcaatcctttatacagcgcttcctccatggtgttggcaatgcccaacacctcgccggtggatttcatttccggccccaggtgcgtgtccacatccaccagcttttccgaagaaaagaccggcaccttcaccgccacatacggagaaataggggccagatccgtcccatagcccatttcacgcagcttttcgcccagcatagcgcgtgtggccaaatccaccatcggcacacccgtcaccttgctgatatacggaattgtgcgcgaggaccgcgggtttacctcgatcacatacaattcgtcctcataaatcagatattggatgttaaccaggcccagcgttttcatctccaccgccaagcgcttgctgcaatccaccacgcggcggatcatcgtatcttccaactgccaggccgggtagacggcgatggagtccccggaatggatgcctgcgcgttctacgtgctgcataatgccgggaatcagaatatcctccccgtcgcagatggcgtccagctcaatctcgatgcccatcaggtacttatcaatcaagaccgggttttcaatgtgctgggccaggatgatcgccatatactcgcgaatgtcctgctcgttgaacgcgatgatcatgttctggccgcccaacacatacgacgggcgcatcaaaaccggatacccgatgcgctccgccgctgccagcgcctcgtccgtcgtcatcaccgtcgtgccctccggccgcttgatgtgcagacgctccagcagctcatcaaaccgctcgcggtcctctgccatgtcgatgctatccgcctgggtgcccaaaatcttcagcccgatattctggatatatttggtcagcttgatggccgtctgcccgccaaaggccaccaccgccgcatacggcttttccgtgtcgatgatgccttgcacatcctccggcgtcagcggctcaaaatacaatcggtccgccgtatcaaagtccgtggaaacggtttccggattgttgttgacaatcacgacctcgtatcccgcttttttcagcgcccatacgcagtgtaccgacgaatagtcaaactcgatgccctgcccgatgcggatgggcccagaaccaaagaccagcaccgtctttttctccttaggctgcgcctctataaagtgcgcggcttcgttttcctcatcgtaggtcgcataaaaatacggcgtttcggccgggaattccgcagcgcaggtatccaccatcttatacaccggccgggccttttcctggattttctgcccggataggcgctctatcgtatggtcaggataccccaggtgcttggcctgtttatacagcccctgcgtcaaggactcgttttgaagccgccgctccatgttcaccaggttttccagcttggataggaaccaaagatcgatttttgtcctgtcatagatataggaaagcggaatgccgcgcttgatggcttcaaacaccgcaaacaggcgctcatcatcgcattcgtcgattttggcgcgcacctcatcatccgtcagcgccatcatcttttcatggttcaggctatccagcccgatctcacacccgcgcaccgccttcatcaatgcctgctcaaagctggtgccaatggccataacctcgcccgtagccttcatctgcgtgcccagcgtacgcttggcgtacacgaacttatcaaacggccatttcgggaactttacgaccacatagtccaccgccggctccacgcaggcatacgtctgcccggtcacagcgtttttgatctcgtccagcgtatagccaatggcgatcttggtcgccaccttggcgatgggataccctgtcgccttgctggccagcgccgacgaacggctcacccgcgggtttacctcgatgaccgcgtattcaaagctgtccggctttagcgcaaactggcagttgcagccgccctccacctctagcgcggacacaatatccagcgct

SEQ ID NO: 4576 - DNA, 14501 bp, Unknown
  16S sequences of unknown bacteria
tttctactataaatactctcaaagttgtactcttttcttaaaggggagcagtatacttccaccgcaagatgaagctaatccaaagacgagcctacggatacagaaactttaaaaattaccgcttgagagtacttgtagaatgcggggtgaatctatgaaagacaaatctaaaaaatcaacctattccacaacctttggtattgaccccatttttagcgcattgcagctttttaaataaaactgtctaacacccttgcagtgtggaagttataaacgcggagagagagggatttgaacccccggtacggttgcccgcacacctgatttcgagtcaggcacaatcggccactctgtcatctctccttttaaagctttttaaattaccacactatattccgctcggtcaatatatttctcaattttttattcacatctcatgaatctaccacactctctcctctattccaccactttacttatttattgacctcactcgctacatatttatccattccttccattctaattttttagcttaaatacaaagcggtctacaaaaaatgcgcgcaaccctcactctcccattgcataattaaaattaaatatttatctctctaaagaactttctttaatatcacacccgctaatctacacacgcattttttattgtttaaattctccccccccaaaagtatcttccacattcacacactctcattacatctccctacctgcaatactcgccatactattatctataaactggttttactccgctcaatttcatatttcaatttttgtatcctataaaaatacaactcctgatttttttctcttatttcgattcttttagggattaatagcatctttcattgacatatatgcactcattattacattcttaatttactatgcgcacctttataaaaactctcattttaatttcgtctcttatatcgtcctcgcttttcgcagattggaatttatctttcgacgaaaattcatcatctttgcaggccgacaacggctcagtgaaaattgcaggttcattttcattttccaacaacggcaataactggaaagtcgcagattctcgcgacggcgtaaaaaacaggctcgccatagtcgacaataaaggcgacgtccagggctacatcactttcccggaaaactcaaaccgcctcgaaatattcttctaccaccgcactgcccaatcatataagggaaggctttctttcaacggcaaaatttcattcctctccgacgccttcgcatgcagctccattccccaaaaaggcgagcgcgtccttcagcttggcgtcaactctccagactccgcaatttgcgattccctattctctccgcagtccgacactatgcttagaatattttcagactccgtaaaattatcttccctcggcaacggaagtttcgacttctccctctccggtgaaatatcagaggccgcagaagcccacttcattttcgatatccaaaaagacttcctgaaaaatagatacgttccctattacaagccgctcgacaaaaaacgctgtccaaaaactccgacgggctggatgtcttggaacacttatttcgacaaggccaccgccgaagacaacctcgctgaggcgcgcatcggcaaaaaatttcttcaacctttcggctgcgaaatatggtctatcgaatcttggcagggcaattccgaccaactgcccgtatcgaaattctacaacatgaatctcgaaacaaaccaaaaacagttcccaaagggaatgaagcagctcgcgcaagacattcgcgctctcggattccgccccggcatttggatggctcccttcggaacgggaaacgaagaattttaccgccagcacaaagactggtttctgcattctcccgacggaaagcccatttcatcgtggaatggcaaatatactctcgacccgacagtccccgccgcccgcgagcacttgcgcaatatttttaaaatcgcacgcgaagactggggctacgaatttttcaaaatcgacggaatgtccgggcgcaacaaggggtattgcgcgcatctatacgaaaggccggaaatccgcgcacagtttagcgatccgtcatgcccgaacccatttgaactgtgcgtgattgcattcagggagggtattggcgacgatgctattttcctcgcgtgccaagggcacacctcgggaccggaagccgcgtacgctgaaatgtcgcgcacaggcgcggatgtcgtacaccccaatatgccaattcaatggaagaatgttctcaatcaggcaaagtgcacggtcaaccagatatttacgcacaacatatcgatgatttccgaccccgacaccatcctcgtaaaggatctgcctatcgagactgcaagggtcgaggctacgattgtcgcgcttcccggccagcttacattttttggcgacaagctcgcgggggtcgattctgaaaaaatgaaaatccttcaacagactctccctgtggcggatgtgcgcccgatgtccatttatccgcatttttcgatgcttccgatatggaatctcacggttagaaatcccgtattgggagactacaatgtggttgcgttctttaattggaccgacaaggaggcagatatatccgcatccgccaaggagctcggagtttgccaggatgtggcttacgacgcatttgaattttggacccagaaatatatggggcaaataaagcttccgctcacaataaaagttcctgcgcgcggggtgagaatcgccatactgcgcaaggcttcccccgcaccgcaaattctcgcgaccgacaggcatatcgcccagagcggctttgagtttaaatccgccaaattcgactcctcaaaaaattcgctcgaaggcaccatttcactcgtagagaacttccttctaaaaatgttcgtttccattccaaagggatattctttcgacagggttgaatcgacggctgaggcttccgcggaagtcgccgacggcgtcgccgcaattacatttaaaggaaaagattcttcaaaagattcagattgcgattttaaagttttctttaaaaaataaaccggcttgggattgcacagattgccgcgcagtcttttgagatgagaacaaaatcttgccgctaacagcgcattcttcttagaaatgcgttgttagattttatgtacgcggctgttccgaagatggcgcgtatttgcggcggtagttttttcgcatacttcgctctttacgcaaaacttttaatgggtaaaggcaaggcgcgcccggttgtacacgccgcgcttagcagattggctcataatctaagtcggcgttgcaaattaaaacatttgtcggtcaaagttgtcataagtaacatgaaagcggcaaagattttcgtattttttataattctggcgtacgtcggggttttctcaaatgccgaaagtttttcggattcgcgcgatttcaggcggatatacgtcgcgaggcacggacagaggacacccggcgcagacccgtctctgactcgattgggggtagagcaggcaaagttgttggcacagcgcattcaagaaattggctttaaagggaaaatatatgtttccccgtatctcaggacagtagagaccgcttctgaaatctccaaactgttgggcatcaaaatgattcttacaccggaaatacaagaacgcacccacaaagagggaattcccgacattaaaggcaggagcctcgccgagctcgacaagctatttccatcgttaatttccaaagactcaaaactttcagacaactgggtatatgcggacaattttggagaaaagctcgacgcgcgtgtggcggaaaccatagaggaggctttggagggcgattgtggcgattttattttggtcgggcacaaggctacggtaaaggccgcccttaaatatttgtgcaaaaaagccaactgccaagtggataccgagatttggaattgcgagctcgtctattttatagcccttcccgacggctcaataaaatttgtttcaagcggagtagattttattcctccgggcaaagtcacaaacaatttcaagcgcaacctgcttgggggaaaaccgccaaacattgatgtaaaaaatagaaaattataaggcaaaggcatatcgattgcgcttaggataaaaaagttccggcaactcagcaatatttcaaaagtaaatgcttgactaattggcaaaaagcggaaaatttgctttcttttaattgaaagcgataataacagtccttttattttttgcaaccttcgcgggagcggcagtcgggaaggccgactggggcgtttgccaactccccgacgggaatggggactcgtctttcattcattccggggctgactctttgagcatatatgccctaccccaatcctttccttcggcgtcggccgacaagctgcgcgagaggcgctcaaaattgcgcgaaaagctggactgcttcgactccgcatgcgctcctcaatacgccgtaagagaaattgtaaatttattctatttggctgtcgtttcggaaaatgactgccgtttttgtccgtttccaaagacttcttttagaaatagcggcggacactcgcatactatctgcaatctgttgatttgaggcaaactgtacggtttgcactgtggacgctttatgtcaactgcgtcctaatatctatgtcttaatcggcaaattatcgccgtgggcggattccgcccaagcctaacaatgtacaagttggaataattatggaatcaatacacagttttgcccaagcgcatgcggttttcctatccgggctgattttaattctcgcctatatatttatagccactgagaaaataagcaaagtgacagtggcgctcataggcgcgtgcgctgccatatttctcggcttggtgagccaggataaaacctccgaaggcgccgccaacgcccactactacataaactacatcgacttcaacgtaatcttcctgctgatttcgatgatgataattgtttcgattgcggccaagagcggcatattcaactatgcggcggtaaagatgctctcgctcacgcgcggaaggccaatatttatactccccgcactcgcatttttcacggccttcataagcgcatttctcgacaatgtgactaccgtcattctcgtaatgccgatgacatttgcaatagccgaaaagctcgatataaatccggttcctttcctaatagccgagatattttcatcgaacatcggcggaacagcaactcttataggagacccgccaaacatcataatcggaagtgccgcaaacttgtcttttatggattttataaacgagctcacgccgatagttttgataataatggtggcggtttgcgcgtttttgatgttcgccttccgaaagagccttgtggcgtcggaggataagatagccgaactggcacgctccggcggcaaggaaaagtgcgtgacggacgtgtcgtgcgcagtaaggtcgatagtggttctggggcttgtaataataggctttgccctgcacgacgccatagacatgcagacttctacgatagccctaatgggcgcggcggttctgcttatttttgagaagcccgaagaagtattcaaggagctcgaatggaataccatattctttttcatagggctttttataatagtcggcgcgcttgaagcctcagggggcataaagatgatggcggacgccatactcgacgccacccacggttctcagtccgccacttcaatgattatcctttggggctccggaataatatccggggtaatagacaacattccctacacggcgaccatggctccgatgattcttgaaatcgagaaagtaatgggcgccgaatatgcccacccgctctggtggagcctttcacttggcgcgtgtcttggcggcaacatgactattataggcgctgcggccaacgtcatagtgtcggaaaactccgcaaagcacgggcataaaattacattcatgtatttctttaaatacggcgtaatagtgacgggcatttcgctcgctattagcgcggtatgcttatggtttaaatttttcatctaaaaaaaaggagagaatatgattatcgctgaaacacttattccgatgcacccgaccatctggcagatggccggcttctgcaccgcgggatttttactggtgatggttgtattggcgttccagtcgatacttacggccctcatcggtaaattttttacgacttttgaaaattcaaaaaaataacttccaaccgattgtcgaactatgataaaaagcttaatagatctggcctgcgacacagggttcctgtatgttgactggcgaatgattgtaatgtggggcgtcgttgcggtgctcatgtatctggcggtatttaaggaattcgagccgctattgctcgttccgatagcgttcggagcgctgcttgcgaacctcccgacggaaggcgtgctcaacaagcctgccggcgctcttatttcccccgcggaagggacaactaccgccctgtttgtatccgaaggagacaaggtttttgttccgcgggtagtaaaacacctgccaaagtcggtgtccgacatagtaaaaaaggcagaggaaacacaggccgaagcccagaaggacgtcgaggcctacttccgttttattgaagacgtcacaagcgccgagagccgcaaagacactctaaaaaaagcgaagggcataccggacctcgtagcagttgtccgccccgactattcggacgcggaaacggacaaagaggcttcggaagcgaacatgtcgtttaaagtgcccttcaaaggcaaagtgctcgacctaaaaggctccgacctgctggtgtgggcgcagactaccggtgatgtcaccgatgtgctcacagcgcccggcaagagcgttgtaaacggcgaaaagctcgtcgatgtctatagcgcaagaaccggcggactgtattactacatacaaatgggcgttcttcttgaaatattcccgcccctcattttcctcggcgtaggcgctttgaccgacttcggcccgttgattgcgcgcccgaaaacccttctgttgggcggagccgcccagttcggcgtatttgcgaccttcataggcgcgatatacctcgggttcacttcgcaggaagcggcttccattggcatcataggcggcgccgacggcccgacgtcaatatttataacaaacaagctcgccccgcatcttctcgccccgatagcggttgccgcatacagctatatggcgcttgttccgattatccagccgccgattatgcgctggctgacaactgaaaaggaacgcaagatcagaatgaagagcctcaggaaagtttcccgcttggaaaagctgatatttgcgcttgtcgtcacgatattctgcatattgctcgtgcccgacgtttccgcgcttgtcgcgatgctgatgctcggcaacttcctgcgcgaatgcggcgtctgcgagcgcctaagcaaggccgcgcaaaacgagcttataaacgtcgttactatattcctcggaacgtctgtcggcatcacgatgaccggcgacaggttcctgcgcgttgatactctttcaatactcgccttgggcgttgtcgccttcggcttctccacggcagcgggcgtaatcatggcgaaaatcatgaacctctttggcggagacaaggtcaatcctctaattggctcggcgggcgtgtcggctgttccgatggcggcgcgcgtatcgcagatcgaagggcaaaaggcggatccgacaaacttcctgctcatgcacgccatgggaccgaatgttgcgggcgtcataggcactgccctcgttgcgggatactttattgcaacaataggacactaataggcaatacgggggcgcgccctgcacgggtgcgcccctttctatttcccgtccgttctacctcaaaactcaattcttcttttcaggcgccgccgacaaagcggcgctttttttattcggtcttaaaaatagaattgcgggataaaaacttcgcattcgggaacaagaaaggcgaagggcgttttgggttgcataatgggataaaaacagatgtaattgccgaaaattttagatatgctttcaaagcggcaaccagttgagatatttatggcaagcgacgacaactacgcgccgcacctgtgcgcctcaatggcgtctattatcgcaaataccggccgcgaattgcgatttaacatacttaatagcggcctctcagaatgttcaaaaggcaatattgcgcaattatgcactgaaaatgtttgcgttgattttctcgaagtagataaatcgctctttgagaacttttatgtaattgccaagcatatttcgctcgaatcctgctaccgctactgcatagagagaatcaagcccgacatagacaaggctatatatttagattgcgacacaatagtcttgggcgacataggcggacttttcgacatcgatatttcagacgtatgcgcaggggttgttgacgatgttataagggagtcttacataaaatctctgggactttcgagatactttaactctggcgtaatgcttttaaatctggcaaaaatgcgcgagataaacgccgcccaaaaactctttgaaataagcgcgaaactctcaggcaaaacaaaatatctcgaccaagacgcgctgaatattattttctctggcgatgaaaaatttctgcctcagagatggaactctgtagcccccctttttagaagaaagcccaaaatgaaatatgccgtgcaaagcgatatccgcgacgccgtgtacaatccaggcatcgtgcattttacggggcccgacaaaccgtggaagattccatacacatttttggcgcatccgtacactcctgcatatttttattatttgtctaaaacgccgtacgcggggaaagccgacgatatttttgggcaattccggccgtttgcggcgcttgccaactatataaagcgccacctgtttttctttctcaagccgggatttctcgatatgcggcgcctttattcaaaaaacctgcggaagttttcggttgcgggggcaaagtagtgctttttatgcaattcggcgaactgtgcattgcagcatatctgttaaccgccaacgcctcggattatcggaaagtagggagttgacaggcgcgccgattttgggattatataaaaaagcttatttcttatgtacacggtagcatgcatgaaatggggagacaaatacggccccgagtacgtcaatagactgtataatatggtcgagcgcaacacgacattgccgtttaaattcatctgcttcaccgacaatgccgacggcctgttgccggaagtttctgtgcgtccccttcccgatatgccgcttccgcccgacaaagagagaggctggcggaagttgtcgctctttcgggacgatgtgggcttggaggggcgggtgctgtttctcgacctcgatgttgtgatagtcgggaacatagacggcttttttacaatcgacggcgattttatatttatcaggcactggaagccctcagtcaaacagggcgtcgggcagacggcggtttaccgcttcgaggccggaaagctaaaatttttgtacgacgattttatagaaaatatgcaaaagataaaatcgtcgttccgccacgagcaggcgtatgtaagcgacgcaatgtcaaagaggggaatgataaacttctggcccgacgaatggctgccgagtttcaaatacatttgcatgtatccattcccccttaatttcttttttgagccgagactcccgggaaaagccaaaataattgttttccacgggaatcccactcccgaccaagccctgtcgggcaaagtgaagggaatcaaaaaattcataaggtttgtcaaaacccctgaatggctcaggagcaactggcgctaagttttttaatataattttagaatttctactattttttcggaaaatcggcagtgtagcgcggcatttggcgcgcgtttttaagaaatttatcgcctgccctgccgcgccaactgaaaatctcgcataagtttttttaatcgcgcaagcgtttgcaaacgtgcgtcaatttctcggcctcgcattggctaccccctctatataaaaggggcttgtagatgcgtactcaggaatagatgccgggtaggactttcccataaaatcgactaccgactttacgtttccgtcaaataaaagattcattttcgttctaaaaggagcccaaattgcggaaacttttaccgagtcaggcctcgtccattccgccacatacacatcgccaaactttgatatttttgggcggcttgccccctccggaaggacgctcgacaaaacctgcattgccttgtatgcgggcttcggggacatatctttgtgcacaattccaaaattcgcctctgggtctgaagtcttccattcgcccgccctgaggttgtaccagaacattttatcaactcccgaagatagcgccactatgtaggcaactgccaaattttgagcttgggcgttttctgttatcaccgaatttgcgtttgtgaaaacgattatatttccagcgcccttaaacttatatattccggcgactgcccccttgtagtcctttgtaccggcctcgatgagcggtataaactcgtcgccatttttgagggcggcggctgtgaggaagcgcgatgccgggcgggtcatttcaaaattgaaatccgattcgaatccaggcgcaggcttttggtattgctctttttccggaacgcctttttttgtccaccaagtctcccaagcaactcccatttttttcagataaagatcgcctactgtctttctggctccgccttccaatgagagcgcatagaatagcggcaatccgtttgtcgggaaaataatggttccgccgcgtccgacataatctgcgagatcccccatatatttttccgggaaagattcacctaacgacggtattagaaccggaaattttttgacgtcgaggctcttaatctgcgaaagcccgacagtacgcatacttttaaaaatcttgtccaaacctacatagtttaggtttttaaccccatcatatcccgctttggtatccgacaccacagaaacgacaatttttgagctgtcaatgccgattcgtttaagagcagcaatcgcaggctcctctacgcttgctacggcagaggtgggccaaccaacttctgttatccatataggcttgtcgccgatgccgtacctatccatcaattttctaagtttttcgacctcgcctgctatcgcctccggcctgccgccccagccccagttgtagggatggatattcattatatcaaaatattttccggcgcccgccttcagagagtcctctatgaaatcgagcggcactccggcagttcccgaatataaaacctttgacgacggatctgccgattttatttcgcgccacgacctttccaacaatttcgcgtagtcggctccttttggggagtcttctttccagaatatttttacgtttggttcgttgtaaacctcccaaaaatagaagtcgtccttgtagcgggtagcaactgtctttacataattaccccattcgtctaagtgcttgtatgccgggcttgcccaaggaactgtataggcgagtatcggcaaaatttttacgtttgccgctcttgctttctccaacattgaatctatgtgcgaaaacttccatttccccttttgaaactccattccgacccagtccagatcggttctaatccatgagattcccgcatcttttgccgccgacaaagttttgtctatgtgcggacgctcgcccgaacggcttatgtgtgcgcatattccgtatggttcggaaagtctgtcagcctgggcaaaatgggcgcatattaaatatgagagcacagctatttttacaatgagtttcattagtctttcgcaatttttagattcattttactttgaggcataactataaattataacacatcttgcgtcaatcgtattgtacaaaaccaagtttaagcttagcaacatccggctatgggacgacgaaaaacgcgccgcccactgcgccccgcgctaaaaactatctaagaggcgctgcgccccgataatacattgcgccagtcaaaggcagaaacgggagacgcgtcttaaatcgatagattttctttaatcacaaaaaaaccccgcaactgcggggttttacattttattaaaatgaattactttttgccggcgtcttccccggcatcgctttcctgcgaagattcttcttccgatgtatcttcttcctcgattatttcgtcctcagattcctcgtcctgagatgtatagtagttctggtaagacttgtcgtaataattcaggttatatccggaagcggccccctgcggaaccatattcataatggcaccgacaatcggcacattggaaaccatgagtcttctgatgttcttctgtatggccttgcgggaaactgaattgaattttacaatatacacaacaccgtcaacatacggcagaagtgcgattgcgtcgctaacggctcccaccggcggagagtcgataaagaccctgtcgtactgctcccggaatttagcaagcattgatataaattcttcgctgccgagagcctgcgtgggattctgcgagcgcttttcgcaagggaggacgtcgaggttcggataatagtctttaattacacattcctcgattggctttccgtcttcgatatggctcactaccccgttttgagactcaattccaagaattttagccattgccggcaggcgcaagtcggcgtcgattataatggtcttttctccgtgcatggcgcacatgagagcaagattggtaacgacaaacgatttaccttcggaaggggttgtcgaagtaaagagcaatactttcgagtcttttgcgattgtattgacttttaggatagagtgcagcgagcggaaagcttcggtagtcgccctgtccgcatttgaaaccgcgacttgcgccttttcggaagaattgagctttctgattcgcggaatgaccccaagcaaaggcaatccaacaaccgactcaatgtcgtacgcgctctttgccctgtcgtccataaacgcgacaataaacgctacaaggacaccgcccgcaagagaaccaaatatgcccaatattatgttaagcggaatattcgggcttaccgggcggattgccggagaggccttgtcgattatattcgcaccctcgtttatgaggttgacctgcgcgagacgcacattcatcgaagcaatgagtcccgcatgcatgctttcagcaacttgcttttcgcgttcaatggatttatagacaatcgcctttcttccgaggtcgagtatctcctctttcttttcaagcagtctcttttgcgactgctcgtaattttggcgggcagcctcatacgcagcctgaactttttgctcggccgatcccaccgctacatcaatctccttattgagctggtcgagcgccttgcgagcctctatcatgcgcggatgcttttctttgtagcgtttctcggaagaagctacaaacacctgttgagtcgatctatctgtgagaagtttgcttatctgcggaagctccgcaataaagggaaggtctgtcaggggcttgccctcccgcttaaattcttggacgagattccactgggttgaggccgagtcgaaagcgcgcttgtcggatgttagaattgtattcaaatccctcaactcatttctgtcaacgtcgtcgaggttttcgagggaaattgccttgtattgttcgcggtattctacaagacgtttgtcaagctccttaactttggcttcctgttgggcgacttttattctgagttcgtcaatgctgtcgaggattttctgaacgcgagtatggtgggtgtagttcagatattcctgcgcaaagaggttggcaatagtagccgccatatctggatccgggtgctcaaatacaatgcggattatgagcgacattctctcaggcgcgatagtgcggttttccgcgagcaattcctcctccgtcttgcgtgggccgagggtgaacatatcgttatacggagccataaagcggactatttcgtcctccttcatgcgcgactttaccgcccttataatttcgttgctttcgaggattttaacttgtgtgttaaagtcctccattgagagaattgtaaagtttcggcttttttcagtagagcccgggccgtcgattgcaacgtctgcatcgcgcaatatctgaacccttgccatggacatataaatcggggtgacgcgcaaggtgtaaagaatgacacccgctaaaataataaaggcagttataacgatatacgcccatctttcgcgaagaatcatcatataatcgcggaaggttctgttggggcgttccgctgccccaccgccgccggcgctgttaccgccaccgtagccgtatc

SEQ ID NO: 4577 - DNA, 3040 bp, Unknown
  16S sequences of unknown bacteria
attcccccgcttcaagtgcgcggagcactaagcggcgagttgggacttgcgagcgattgtggagatagaaagccgggcgcgacaggaggacatgacatggaaatcagaaaggcacaggaggcggatcttccggcattgctggatatttacaattatgaggtagagcatggcacggcgacctttgatcttcatccgaagacgatgaaggagcgcagagtatggtttgacgagcatccgggcggacggtatatcctgcttgctgcgatcgaggatggacgggcggtcggctacgcgagcctttcgccttatcgggagaaggaggcgtatgccgccaccgtagagctgtctatttatgtagatgtggcatatcgcgggcgcggcattgcggatcagctgatgcaggagcttttatcttatgcaaaagcgcgcgaggatgtgcacacgatcgtctcggtcatcacagagggcaacgagacgagtgtaaggctgcatgaaaaatatggatttttgcactgtggctgtattcatgaggttggcgtgaaattcggaaaaccacttggcattgtaaatatggagctgatcgtataatgtatcggattttgattattgaagatgaccgtgcaattgcggagacgatgcagcggcagatcgccctgtgggggtatgaggtgcgctgcgtggaaaattttaaagatgtgttgtcggagtttacggcttttgaccctcagcttgtgctgctggatctgatgcttccttattttaatggttaccactggtgcagcgagatccggaaggtatcgcgcgtcccgatcgtatttctctcttctgcttctgacaatatgaacattgtgatggcgatgaacatgggtggcgacgactttatcgccaaaccatttgatctgaacgtgctcacggcgaagctgcaggcaatcctgcgcaggacctatgatttcggcagtacggagcaggtgctggagtgccggggtgcggtgctcaacacgtcggatgcaagcctgacgtatcagggagaaaagctggagctgacgaaaaatgaatatcgaattttgcagacgttatatgagaatctgggcaaggtcgtaagccgcgataccctgatgcagcggctatgggagacggactgctttgtcgatgaaaatacgctgacagtcaatgtcacgaggcttcgcaggaagctggatgggatcggtctgcagaattttatcgtgacacgcaagggaatggggtatttgctggtagaagagtaaaaatacagtgaggatgcaggaaacgatatgcaaagagaaggagatcggttatgctaaaatcatacatgtatacgcatcggcgtggcattctggcatttttcctgatgatgattgcggcggcctgcatcatccggctgtatgagcttcctccggaggcagtcgggtatactgcggcagtgagcggattcatcggagcagtttttttactgggagattttatgcgctttcgaaagcgtacgtgtgcgttggaaacgcttcacagggaggctacggtgtcgctggatagcctgccggagccgcaaaatgatctggaggcgcagtatcaggagctgcttcggatggaatttgcagaaaaggagcggctgagcggggagcagcaggactgttaccgggatatgatggaatattacagcatgtgggcgcaccagatcaagacgccgattgcggcggcacaattgattttacaaagcgcgcagcagcagggcggagagctttctccggaggactgtgcggagctgcaggaggagatccgcaggatccggcagtacgttgagatggtcatgtgctatttgcggctggattcggatgcgagtgactatgtgatccgggagtacgacctcgatgcgatcatccggcaggcgttgcgggaaaatgcgtccgtctttatacgcaaaaaaataaagctgcattatgaaccgctgcaggtgaaggtgctgacggatgaaaaatggctgctgtttgtgatcggacaggtattatcgaatgccctgaagtatacaccatccggcagtatcacgatctcgttaaaggcgccgaagacattgtgtgtccgcgatacgggaatcggtatcgcgccggaagatctgccgcgcattttcgaacggggctatacaggcggaaacgggcgcacagaccgtcaggcgagcgggatcggtctctatctgtgccgacggatctgccagaacctgggacatacgattgcggcggttgcgcatgaggacgggacggagctgcagattgatctgcaaagtgaaaggctggagattgagtaagcacggaaccttacaaggatgtaaggttcctgtaaggagaagcgatggcttgagagaaggaaattgcgtataatggcatccgtgagcaggagagaaggcttacggatgccttttttaagctgcgaagcagcattcggttatgacatatcaggaggagtaaaatggcgattttatcagtaaagaatctgaagaaaatttatacgacccgtttcggcggcaatcaggtacaggcgctgaaaaatgtgacctttgatgtggagtgcggcgagtatgtcgcgatcatgggcgagtcagggtccggaaagacaacgcttctgaacattctggcagcgctcgataagccgacagcaggaagcatcctgcttgatggcagagatttttccagaatccgggaatcggagcgcgcggcgttccgaagagacaatcttggctttgtttttcaggaatttaacctgcttgacaccttttctttgcaggacaatatttttctgccgcttgtgctcgccggagcgccttacgaggagatggtaaaacggctcgagccgatcgcacggaagcttgggatcgcagatattctgcagaaattcccgtacgaagtatccggcggacagaagcagagggcggcagcggcacgggcgctgatcacacacccgaagctgatcctcgcggatgtaaactgaaccccatgtgcttactgtacatagagtgtacacagtaggatta

SEQ ID NO: 4578 - DNA, 7835 bp, Unknown
  16S sequences of unknown bacteria
ccgcgatcgagataatcgtcccagccgatgtcataaagagcgtcgctgctgctcaggcggtatacgtcaaagtggaacagggggatgcgccccggatattcgttgaccagcgtaaaagtggggctggtgacgcgctccgtacagcccaggccgcgggcaagtccccgggtaaacgcagttttgcccattccgaggccgccggtgtaagctaccacggtgccgggggagagggcctgtcccagctgctcgcccagctgttcggtttctttttcgctgtgggaaagatacatcatattgtttcacacctgaatttctgccgtgcttgcgcggctgtttttgtttatcctatcacaaaagagcagcagtgtacaggaggtttgcttattttgcattttatggtataatacccccacactggatagatagatccatttttggaaaggataacaccatggcaatgggttttataacaaaagtaaaacgatttttcgctcaggcggatttgatactgctggcactgtgctgtgcggcggcgctgtttggtattttgctgatcgccagcgcgaccaactataccggttcgctgcgttatgtgatcgtacagtccatagcgttggtgctgggggtggcgctgtatgcgtttttcacctttgtggacgtagaggaagcgtcggagaaatggaaatggatttttgcctttaacgtggtgttcattttactgctgctttctccgttgggagtggatcccgtccagtcgggcggcaatcgggcgtggctgagtattcccggttttcccatggacatccagccttcggaaattgtaaaagtgacttttaccattttactggccaaacaactggcttattatcaggaacatgagttgagttccatccgttccgtggccttttacagcgggcattttctgttcatggtgtgcctgttgtacgccatttccagcgatgcgggcagctgcctggtgtatgtggcgatctttgtgtgcatgacttttgccgctggagtgaagctgcgctggtttgtgctcggcggcgccggcgtgaccggcgcgtttctgctggcctggttccaagggtggattccaagctatatgcagcagcgcattgaggtaattctggaccatagcctgtaccccatgggggcgggctggcatcagggacgcagcatcattgcctttggcagcggcggctggtttgggcagggattgttccatggcacgcagacccaatcggacagcagcagccttccggcccggcacacggactttattttttcagttgccggcgaagaactgggctacattggctgtattgctattattgtgcttctggtggcgatcatccttcgctgcctggtggtggcccggcaggctaaaacgcctatgggtgcgttaatctgcgtagggtttgctgcaatgcttggctttcagatgctggagaacatcggcatgtgtattttcgttatgccagttatcgggctgacgctgccctttttcagctatggcggctcatcccttctggcggtgtttgctgctatggggattgtatccggtgtcaagatgcggtcgcttccggaatggctgcgggattgaacagaaaacaaacgctccacggatccatccggggagcgtttgttttgttcagccttccagcaccagagtgcggtgctgctggtccagcgcggcggtttcctgttccagctgcgcccgtgcagcgctgaggcgatcctggatctgcagcactttctggcgggcggaggcagcttgctgggcagtgtttcggatgcagtccagaacggcccagctggaaaacacatcgtcaaagaagtaatcggcaaagcggaggaaatcgccgatatccacctgaatattggcctgcagcatgacatcggccagctcagcgcggtagcggttcaggtcggactgcaattcgttgatgcgggactgcgcttcgtccagtttggaatatttggccagatcggtgatcagcccgccgccgaagagatcccatgttccccagccttcggcactgtccagcgtgctggagacggcatagagcttttgcagcacctcctggccggcacgctcggcttctgtaagttctttggcctgggccgccaaggccgagagccgatcctccattcggcacaatgccgcgccccgcgccggatcggccgttttcagagcttcggctttctgtgccagcgtttcctcgtactcacgctctgtggtggacagggtttgcagttctgtttccacggagagcaggcgctgttccaccatacggcattgttgtatagcggcgtcgtgtttgacggcggcggcatatgcctctgcctgttccttggccagcttttcctccttttggctgacaatggagtagaaaagggaggagagggaaacgcgctgaagcttgtccacatcctcctgctcggcagtgcggatactgcgcagccgccgctctgtttcctgcagctgggaaagctgggcgttgagctcattacgctcggcgcagagctgccgtttgcgcaggagtttttcgtgcagggcggaaagtcgggcatcgtaaggcgtcatggggggaagctcctttcagtttatataagccatcataccacatttgaagcaggagaaaaagggcgctgcaaaaatttgccaaagacggaatgtttccggagattgtatattcaagccggaaagacagacaatacctaccatggaacacatcaatttcattttgtgggaggtttttgttgtgaaagagacttggatgcgccgcatgccggcgctgctggccggcctggtgctgaccctttctttggcgctgcccgcctatgctgccggtgcggggagtgcagagagtatggacgaactgactgttatgccgattgcggaaaaccagtcgtatgccacctatcagaatgtgcggatgcaggggcggctgaacgctaccgacccagaaggcggagaactgcgctatgagatcctggaaatgcccaaaaagggaacggtgacgctgaacgaggccgagggagacgtgtttgtttatacgcctaacactggcaagactggcaaagattcctttacgttctgcgtggaagatgaaaatgggaatgtgtctgcgccagctacggtgaaagtggaaatcctgaagagcaaaaccggcatccgctatgccgatatggaggacaatgcggcccatgcagcatcggtgcgcctggctgaagaaggggtatttaccggccggcaggtgggtaaggaattcttttttgatccggatgcgcaggtgagccgcagcgaatttcttgctatggccatgtctgcggcagggatcgacgaggtaccggcggttagcgtgacggggttcagtgatgatgaaaacattccctcctgggccaaggcgtatgccagcgaggcactgaatgccggcgtgatttccggccaggtggaaaatggccgggtagtgttctcggccgatacccccatcacctacagtgaggctgcggcaattctgaaccgcactatggcggtaactgatgtggacgcggaagcattttccggtgaaaatgtgccggcttgggcggtgcagtctgtggcgaacctttcttcggtcggcgtactcagcgacgggacggactgcaatgcaacgctgacccgtgcagcggcggcggaaatgctgtgtgctgccatggatttgatggaaagcaaaagcagcgggccctttgactggttaaaataaagcaaaggggggagggaactcccctcttttttgcgggataagagcattgtatctttttggaaatcgtgctatattatatactgtattgttataagctgaacctatgccgacggcatgtggaaccatagactttgttttggaggcagttacatgaacattgcagttttagcggggggcttaagcaccgaacgtaatatttccttcctctccggcgtgaacatctgccgggcgttgcgcgagcggggacaccgggcggcggtggtggatctttatatgggatttgagggcctggaccttgcgccgaaggacgctttcgacgtcccggacggccttgtttccacgatccctgcggggcgggaggagccgaatctggaagcagtgcgccgcagccgtgccgatcagagcggcagcatttttggcaagggcgttctggaattctgcgctgcggcggatattgtgtttctggcgctgcatggccagtgcggcgaggacgggcgcgttcaggctgcttttgacttgatgggaatcccttacaccggcgcggactaccgttccagcgctatggctatggataaggccatcaccaaagtgatgatggaatcggctggaatcctgacgccgaaatggcaggaatttacatatactgcagccgatattcctgtgctgtgccagagcattgcgtgcccctgtgtcatcaaagtggtgaccggcggatcgtccctgggcgtacaggtggtggaccgggccgaacaactgcctgaggctttgacgctgtgcctgaagtacggaaaccatgtggtggtggaggagaaaatcactggccgggaactgacctgcggcgtgctgggtgaagagtatctccctgcggtggagattatccctgacgaggcggggtatgattacaataacaaatacaatgggaagccgcgggaattatgccctgctcctatcactgaggccgagcagaagcttctgggcgaaactacacttaagctgtatcataaactggggttgtctgtttattcccgggcagacttcctgctgacggaggacggaaaggcctactgcctggaaatcaacactttgccgggcatgactcccaccagtctcatccctcaggaagctgctgctgtggggatttcttatggtgaattgtgtgaaaagatcattgcattgtccctgcaccagcggggaatgcgctgaaacgggaggcaagggttatgcaaagtacgaccgcagcacagctgctggaggccaccggcggcacgctgcttttcggcagcgcggcgcagtgtgtaaacgaagcggagacggacagccggcagtgccggccggggatgctgtttgtgcccctgatcgccgcccgggacggacacgattttattgccccggcgctggctgccggcgctgagggcacgctgtgttcccgggtgccggagaaattggaagaggggaagttttacattcaggtgccggacacccgcctggcctataaagcactggctgcatggtaccgggcgcagtttcatattccctttgttcaaattaccggcagcgtgggcaagacgactacaaaagaaatgattgctgcagtactttcggagcacgaaaaggtactgtggaccgagggcaatttcaacaatgatatcggcgtgccgaaaaccctgttgcgcctgtcaccggagcaccgcgcggccgtgattgaaacgggaatgaatcattttggtgagatccggtatctgggtgaaatggtgcgcccggatattgcagtgatcagcaatgtgggggatgctcacattgaaaacttggggagccgcgaggggattttgaaggccaagtgcgaaatttttgattatctcagccctgacgggtttgctgtattgaatggagacgatgcgctgctgaatactgtgcacccagaggttccggtgtatcgctgcggcgagggcgagaactgcaacgtgcgcgtgacggaagtggaagacagaggcctcgacggagtggactgcaccgtgcgcactgcccagaaggcctaccgcctgtccatccctgcgccgggacggcacatgatttacagcgcggccatggccgctgtgatcggagaaaaactgggcctcactccggaagagattacggcaggcgtggctcactatgagccggcgggggagcgaatgcgcctgattcatcgcgccgacggtgctttgatcctgtcggactgctacaatgccaatccccagtccatggccgcggccattcacaccctggcccgaagcggacgagagcgtactgcggcggtgctgggcgacatgggggagttgggcgcgctctcgcctcaggctcattacgatatgggaatgtgctgtgcccgggagcagatcgatgtggtggtggccattggggagaaagcgaaggagattgcccggggcgcccgggaaggcggctgtgaaaatgtgcagtggttttccgatcgggcggcagcgctggacaccgttttggctttggcaggccgggatacggcggtgctggtgaaggccagccacgccatggcgttcccccagctggtggagcagctgagcaaggcatgaggtatgcagaggcaaagagaaaaacaggagttttcaatgtatgattgatattaatatttcagggcttgtcaaatcctttgacctggaaaaaaagattttggacggggtcacgtttaaaattgattccggcgaacgggtgggactgctgggcaaaaacggcagcggcaagagcacactgttcaaaattttgaccggtgagatggattatgacagcggtgaggtcatgattgcgcctggccggcggctgggacttatttcccagattccggtgtatccggagggatataccgtggaggatgtgctggagagcgcctttgcgcgtattcacgcgatggaggcggaactcaagcgcctggaaggacagatggccggcggggacggagatccggcgctcctgcggcgctacggcgagttgagcgcttcttttgaaggcatgggcggctacagcacgaaaaccgaactgaacaaggtatgcgcgggtctgtccatccctctggatatgcgcgcgcggcgtttcgattctctctccggcggcgaaaagacgcgagtgaacctgggacgcctcattttggaagatacagacatcctgctgctggatgagccgacgaaccacctcgacctgcacgctacagaatggctggaggaatatatctctcattttaagggcaccgtgctgaccatttcccatgatcgctattttcttgaccgcactgtcagccgagtgatcgaactgctggacgggaaggcagaattttactccggaaactatagtttttacgcggtagagaaagaaaagcgctacgaggaacgcctgcggcagtatgagaaaaatcaggccaaaatcgaacagctcagcgaggcggcagagaaaatgcgcctgtgggcctttcagggcaacgataaaatgtaccgccgcgccattgtgatggagcggcgcatcgaaaaactcaacacagtggaaaaacccaaccgggagcgaaacctgacggcatcgtttggtgagcgggagtttgccggggacgaagtattttccctgcgggatctatccatgggctttgaaggacgcacgctgttcttcaatgtgaatttgaaagtgcgcggcggcgaacgcattgctctgatcggcgataacggtacgggtaaatctacctttttgaagcttcttttgggacaggaacagcctctgggcggacgtatcaagaccggccctgccgtcaaggcggcgtaccttccgcagatcgtctccttcccccacggtgaacgcaatctggtggacaccatgatttatgagacggattgtacggcgcagacggcccgcaaccgtctggcggccttccattttcggggggaggacgtgttcaaaagtgtatccgttctctccggcggcgaactgagccgcttgaagctttgcattctgatggatgaggatattaatttcctgattctggacgagccgaccaaccatttggacattgcctcccgggagtggattgaaaat

SEQ ID NO: 4579 - DNA, 19331 bp, Unknown
  16S sequences of unknown bacteria
agaaccgctatcttacgggagaagtacgccgcaaggtcatataccacctatataagctgccgcaggtgacgataaacaaccgcaaacagctcttaaaagacggcgaaaccctgagaataggggacatcaagataaactgcctgctcgttcctggacatacttggggacatatggtgtaccttgtcgacgacaaatatctctttaccggagacacgatatggttcggtgcggacggcggctacagcttcatctccgctctggctgaggacaacaagctcgcggaggagtcacttgccatactcgaagcaaagctgaaaaagatgcacgcagagccgcttttcatcacaggacatacgggatggacggacaatttcaaatttgcgttcgctcataaggataaactctgctcaccatttaagaagaaagtacacgacccctccgcaccttacgacgcatacgacgaatcggacgacacggaagagaacgcaaagagcggatacctgaaaggcgtgggaagatgaaggacagcgagctgaaattcgacagaacctgccatgtgctctactcaaagcagtgcaaaaaggagattcaaagcaaaatcgcgcttcactatccgccggacgagagggaaggagtgtgggagagagttcagctgaaatacgcggaatttctctcggaatggcgtacagacctcggcggcaaggataacttccacaacggaaaaggcggcacatacgactgcatagctatcatgagctactacgtggtgtgcaaagacgtgacgacgttccgcgagattgaagaaatggaagagaaccttatcctgccgtcgttccgcaagctgaaatttgtggactgcaataaacctctctggcggagacttatgtacaaagccttcacctcggcgaaaaaggctgcgacagatggcacgactacgagatgaacgtttatccctacgacgcgaaaaagccgatttattatgaatttactgcgtgtccggctgcggaatttacgaaacaattcggactggtggaaataatgcccgcactgtgcaatgtggactacgcttcaatggaatgcattcacgcaaggcttgtgagaaaaacgacctgctcaaacggatgcaaatgcgactacacaattgtcggagataaagacccatatataaaggctcaccccgaatatcgagacgaagccggatacaggagaaacaaatgatactaaacgtaattttagaaggactcggactcggaattctgctcatccttgtctgcgctgtcggaatacgcaacggagctgtcggcatggttcatctttacagtgaagaagtgcagaaccgctgtgttgacgcgggaatgacgacgcatgagaaaataaagcgtaacagcattctttttaagctcatttgcgttcccggatatatcgcatatgtgctgtcatttgtgtacgcagtgaacggcgcgcgcggatttgtttcgggattctggcagatgctcgtgattctgtcaatcatgaacctgatagaccgcttcctcatcgacgacttgtgggtagggcatacaaaagcgtggacaattcccggaacggaagacttaaagccgtacatcacgaaaaaagacaagtgcaaaaagtggatattcggcacagtcggcatggtcgttatctccgcgatactgtcgggaatcatgatgatttttgtgcattaaaaggagcttaatatgctttttcagacatatggcgagaaaaataaccccgcagtgctgttcttccatgcgatgggcgtgacgggggagagcagtgaacgtgtggcaaaggagctgtccgacaggtattactgcattctcccgacctcgaccgtgtattgcgaagggcagagatacataagcaaggcagacgaagtacggcaggtggaggattttctctacggcgaggcagtggacagtctcgcgttggtcgtcgcttcatctctcggagcggatcttgccatggcttttctcgcggagacaaagctgagcgtcggtcatgtattcttcgacggagggcagttcgcgcagataggaaaagccgctcgccgaattatgacgccgttcttgttcctcgcgataaggagcgtgtatctctcgaacggtaaaacactaaagaaaatcatgtggtgcgatgacgacgagataaagccgtattttatagccgcgggaaaaaatctcagatacgctaaccttcgccgacagatatcggacagcttagaggacaaaccgtttcccgcgcttcccctagaactacagaaaaacgcatattttgaattcggcagtattgaagaccactacaagtaccgtgatgcggtgatgaaagcctatccgggcgcaaattatcccgtatttgaaggatataaccatatgcagtatcagatacgcgacccgaagggattttcagaaatgctgcgctcggtcatggagaaaaactgcctgccgaatcttccgtttttgagaaagtgagactgacatgaaatacaaaatacaaaaaaatacggttcaggagacgctcgttatcccactctacgggagaaaaatgtgctcggagctgtacccgaatctttacagggacgaaaccgcgttaagactttacgaaaacatagactatgatttttcgaagctcgcggaaaagtcgaagagcatgatgcagcgtttcggttttcttgaagctgccatgcgccagaacgaccttgcatacgaggtgcgcgattacctgaaatcttatccgaacgcggcggtggtgaatctcggctgcggacttgacaatacgggaagaagctgcgacaacggcaagtgtaagatatacaacctcgactttcccgatgtgatagacgcgcgaaacgaacttctgcctgcgggagagcgtgaggaaaacatcccctgcaacctaaacgataccgcgtggttttctcaaattgacgcctcaagcggagctgtgttctatgcggcgggagttttctattatttcctcaaagaacaagtgaagtctctcgtgaagaatatggctgaggctttcccgggggcagtgcttgtgttcgacgcggctagccaaaatgcggtaaagctgatgctcaaaacatggcttaaggacgcggagataaaggatgtcggcgcgtatttcgctgtgtctgacgcaaagagcgagctttcggagtgggacgaacgcctgactgtcacaagccgcggatatatgctcggatataacgatttaaaagacccgtcggtcagcggatttttccgttttctctcgaaagtgggggacaacatgatgaaaatgcagatcgtaaaaatcgaattcgcgggaaagtgaagcaaatggagggaataaaatgaagtacgccggaatgcctatgggaatgtggacgtttttttgcagctccttcaaaaatcagcttacctgcgttttcggatatgatgaagatacggcaaaagctgtaacgaaggcggcaaaagtaaagtataaggagataatcgcgacactgccggaatttgaaaaggctgaccgcttcaagatgaacgtagtaaactgcgcaatgctcggagcgtttgtcctttccatgccatcccgtcccgatgtggatcgccttacaaaatactacgccgacgccatgatgacaaagccaatgaaatggttctgccgaaagagcggaaagaagaaattcaccgaaaaagatatcgccggaatgaaagcgaccgcaaaactgaaagccgccgaccgcaatccgtactcttggaacatggacttttacgaatatccagacggaagcggctacgagggaagattcacgaaatgcggaatatgcgcgctgatgaaaaagctcggactgtacgacttaacccccgcgctatgtcaccttgactacaccatgagtgacgcgggcggtaggacagacttcgtgagggaatacactctcgcgtccggcggaccatactgcgactgcggatataagaaaaaggcttgacaaagctcttaggatattttgaataataaccttaaatagaacagtgtcaagccaatcgctctgctcagaaaattaacgggcagggcttttttatattgaatctggtgtgactatcttgccgtagccttcaaatgggtaatctatcgtgattcttccctcagctctgtctcccattccgccgtagaggtcaaccttgccgtcgtcgcgcataacgattcctgatgtaaatgtgcagtcggcaagacgagggagcttcggcgggaagtcgggatagcacgggcgcgttcctataaccttgtagtcgtaaagctcctttgtcttcgggtcgaaaatcgcggaaatattggtgtaaaccgacaaaagaatgcctgttttttcgtcgttttcacgataagcgagatgtccgatgattccgacaagtccgctgtcgagaagatacgcctggtttaccgagccgttctgtccttcaccgatgaatccgtcaatgggaggcgcgtttttgattaggtcggacgtgatttcgtcaaggctgttgacaacggtgtagcctacatatccgggtctggagaacagtccgatttttccgtcggcgagctgtacaaggcgtatatccttcatgctgtacggacccgaggtgaagtagtacaaatcttcgagatccgttcccttgtagaaataaccgcagtagccgtcgagctttcccgcgttgtagcgcacatgagtaccgccgagcacgagctgaccgtggatgaacgatacatacgggtcttcaagctggtatatcatgctgttcggcacaagagtgaactcgtcctttgcagtctccttgaacagcttcgagagtgagcgcgcccattcgtcaggcttctcgactctgccgtagatgtatctctcgcccttgtaagtgaacgggatggagcagttgtaaacgtcatatccgtcgactccgttgaatttgagcttgacggactcgtatatcttttttgtttcttcaaacttttttctttcgcttctgagatccataagtttatcctcacaaattatttttcttccatataataagagacgaatctgtcgaacgccttgttgaacattttcttactctcattgtaatatgtagtgtaatttttgtcgtaatatattgcgtcacggagaataaatcctgcacgacctgtctgaacggcaaattcagccgcaaagtcaaagttaagaccgcttctgataatatcaagcatttccgcgctttcactgtcacgtgcgactttgcctttgagaacggtatcgtaataaaccggaacaacacccctattgcttgcgacacagagagcttccgtaataagacctgcgaaatctgcgtcttttacatccgtcggaatgcagaacattgaacggttgtcgcgcgatgtggttttatactgctcctgcgcttcattcagcttcgggaagggaattatgccgaagtcgctgttcatgtcgcgcattttttcggcgtctccgagaacggaagcaaagaacaacgctctgttctgcgtgaatacgtcgatagtgccttcaacatttccgcctttgttgtagtagacgtcgggattttcgtacgcaagagagcgaattttttcgtaagtgtcaaccataatctgctcgtcaaggtcaagcgagatagagccgtcatcgttcttcaccgtgtacgaataatcgaatgcgttgtggaagttgtcgaacgataagtcatcatagtatattgagccgaacgaatcctcaaggctgacttcaccgttgccgtcaaggtcgcgcgccacgcctacattcatttcaagatacttgtcgtaggtccatttgccgtttttcaccatgtcataaggcttttcgagaccgttattttcaagcacagccttgttgaagaacatgacgtgaatgtttttccataggttcagtgagaggtcgccgggaatgccgaatagctttccgttaacagtcagttcgttgacagccagctgtgaccaccacgtgcttgtgggacggagattgcttacgtcatgcaggttcatcataagtccgtcagcgtaagctccgccaatgacagccgcgtatccgtcaatgaggtcgtatgcaccgtcgtttgcctgaatggattttttcattgaattgagataagagtctttttgaccccagtctccttcaatcggaattcctacaatttttgtgtcaaatgtgctttccacaagaagattgcggtcatgcacagcatcgtttattgcgtctccggtgtattcttcggcgtagaactggtattcctcagtcgttctgtaaaggaagttgaagtctctgccgtcgaatttcttctcttcgattccggcaaataccgatgcttcggtttcttcctcagtctcgctctcctgcgcttctgtttcgccgactgatgaggtggtgtcggactgcgctgtttctttttcttgcacgttctcacttgaacagccgagagttcccgccatcatgagaagcgccagcaaaatcgctatagactttttcatgttttctcctttgtgatttatcattcgtttatactaatttgtccgcctatatgtaataacaggacaaatcgccaagtttccgcatcggcaacaaaagaatatatctcaagctgattgtaacataaaataatcacaatgtcaataataaattaacatttgttgcactgttttgaaaaatatcaccgctgaatttcggcaaaatgacaatgcaattcacataagccgatgtctctatgtaaaaacaaaaagaaacgccccaatccatagtgattttttagcgtttccttcattttattcaatatcgcatatcggcagaatctcaaatcccgcgtcgcgtatcttgtctatcattttgccgagcatttccgtgttggtttttgactccggatgaagaagcatgacctcgccgttgtgcagtcccgtcatgaccttttcaagcgtctcgtcaacgtccggctgagcgtcggtgtcaaaatccttgtatgcccacgaccacatcacagtcctgtagccgagcttgtccgcgaatttcagcacccactcgttgcagtctcccgacggcggtctgaagtagagcataggcggtgcgtcagggagagtttcatagtacagttcttccagtccctgaacttcctcgaggaatgtgtccacactcactcctgtcaaatcatagtggttcactgcgtggttcccgattatatgcccctcgtctatcatgcgttgtatcttgtccgaagcggagcgaacatagtgtccgtttacgaagaatgtcgccgaaacctgcttttctttcaacgtgtcgagaatcgtgtccatcgtgccgtattcatatccgcagtcgaaggtcagatagcataccttcctcgtctcgtccccgcggtaaatggtgcggtatttttttagtgtttccagagtgtctgccgaacgatcccagacatacgtgacctctcctgtatcattgtcgcgcacagtttttccgaaaaaccaatcgtccggctgatcgtcgaatcttgcggtgctcatgtcgtacatctcgtcgattgtggcaagtccttcgtcactccgctcgggaaagttaaagacgtattttccgtctgcaaaggcccatattttgccgtcggatgcattatctgctgcggtttccgctttcgtttccttcgaggtttccgttgtttccctcggctgaactctttctcttccgataccgtcgccgggatttgagacaacctcatttttgcaggaggacagacaagcgagtatcaatgccagcgcgacagaataaagcagtgttttgtaattaatgtatgtcttcaaggatttctcccgtatagtagagttaaagctgatagcttcaaatataaagtatagcactaatacggaggtacgtcaagcataaatctttcagaaaagcaaatgtaacatataatgtgaaaaaataacattgaatatgtgatttagtgcggctgaaatgtgctaaagtagcaaaataaacaaaaaataaaatgaaatatcagtaataatgctcatggaatctatataaaacatgttgtataatgatatagtaaatgtaaacaacagtgaaaataacactttgacgggaaggtgcaatatggaaaagacaagcagaatcacagcttttctccttacgcttctcatacttcttgcgtcatgctctgaaaaagcacggataaagaaaagatcacaacacaggaaaatgaaacaacggtatcggagacaacagaagcggcagaaactgaatcggaaatagaaaccgcttcaaaaaagattgagaaaaaattcgctgataaaagctacggcggaaaaacgtttacaatgctcggatatgatgtaggacagcattactataataatatctcccccatcttcaatgaaatatgggctgacggttatacaggtgagataataaacgatgcagttttcgacagaaactccaagacggaagttctgcttgacattaagctcgaacatctcttcaactccaatatcccgaatatgataaaacaggcggtaagctcatcttcaaatgattttacggcggctctcggttcactgtcaggactcggttcctcctttgaggccggagagcttgcaaaccttatgaatttcgagaatattgatacgactgccgaatggtatgacaaaaactgcgttgatacattcacactattcggagacagactatactggctcacgggagactatatgctatgcgacgactacgcggttcacgtatttttctacaataagaatataattgaaaacaacggattcgaccagccttacgctatggttgaagagggaaaatggacgatggattatttcgataccctcgtgaatgcctgtgtgagagacgtcgacggtaacggaactattgatataaacagcgacaaggatatagtcggactgataggcaatgccgatgaaccaaagcactggatttacggcgcgcgtgaaaagtccatcgaaatagacgacgaaggttcgtttgtggtgaatacgctcagcgagagacacattaacgtagcggaaaagatatacagaatactcgtcgaggataaggtattctataattcgtcagatcccgtactcaataaagcgttcacttccggcagagcagtggcttacgatatttctcttgcacttatcaatatcttccgcgatatgccggacgaattcggtattcttccttatccgaaatatgaggagtcgcaggaaaactacggtcactatatatcaaactttgtctgcaccgcaatcgtctgcccaaagactgtggaagaccgcgattatgcaggtgcgtgcattgaagctctctcggcatactctaccgaaaccgtaaactccggtctgtatgatacacttcttgcctcaaagctcgtccgtgacaccgaaagcgttgatatgctcaagatatgtctcgaaacgaaatattttgactgggcggtggattttcagtggggcaacacattcctcaatgcgtacaacgctatttacggaaaaaagaactttgaatatgtttcagacgcgacaaaaaacctcaaactccagaatatgcttcttgaaaagattctaaataaagtgaaaaatttcgaggactaacaaataacaagaatttcccgcaggaatcacgagataagtgaacgccgcggggatttttgctttttgttggggtataggtaaaattttacaaaatatcagtgctgaatgtaggattaatgacaaaaaatgtttgaaacgcttgacataactggaattatgtggtatcatgaatacagaatgattgtacgattgaaataaacggatatacggagtatataggacggatatcatgacaacagaaaaccgaaaaaactatcccgcgcatttcagaaaaggcgaagacggaacaataaccgaacaaagcgtaggagagcactccgagaataccgcgagaatatcgtccgaaatactgaacagaatcggacttgcttctgtgggagagcttggcggatggcttcacgacatgggaaaatgctccgaggattttaaaagcatgatgctaaagctcgaagaggacgaaaacgcgagaacaggcaaggttatccatacgttttacggggtaaagttcgttatggatgagctttgcgataagagcgacaatatgtcaattctcacgtcggagctaattgccgcagctgtcggaggacatcacggtcagtttgacatatacgacagtaaaggctgcgacggaattaagcacaggctgaactttgacattccgtatgataaaaccttcgcgaatttttgttccgaatataaaacaaaggaagagctttccgcgatgttttctgccgctgtacatgaagtcggtttgttcactcagaggattgacgcaagcggatatgaagatacacacttctatctcggaatgttgtaccgtatgattctctcatctctcatcgaaggggacagatacgacaccgcggatttcatgtcgggcggggaatactcgaagaactatcctgtgtcaagctgtgactggggaatgtatttgaaaagagtagaagaaaagcttgaaaccatgccaaaagacggtgagataaacgaggcaaggcggaaaatatccgatatgtgcgcgcagttcggggatatggatagcggactttaccgattgtccgtgcctacaggcggaggaaaaacactttcgtcactcagagcggctctcgcacacgcggaaaagcacaaaaagtcgcgtatattctttgtcattccgctgctttcaatactcgaccagaacgccaaagtaatacgcgcgaatatagaggacgacagcataattcttgagcaccattcaaacgtcataagcgagaacaaagcctcagacagcgaaaataaaacgatagaaacagacaagaacaagctcctcaccgaaaactgggacagccctatcgtgataacgacattggtgcagtttttgaatacgctttttgacggaagaacctcctgcatcagacgattccattcgctcatcgacagcgttattgttattgacgaggtgcagaccgtgccgtacaaaatgctctcgttattcaaccttgcgataaacttcctcacgcgattctgcggagcaaccgtcgttctctcaagcgcgacacagccggagttttccgcgggaaaatttccgatggataacgctaagaacatgatacagacagatgagagcttattaagcgtatttcgccgtacaaaagtatacgacctcacacagcgcggcatggacgaggaagagatagcgtacatggcggaagagaagagcatggaattcagcagtgcgctcgtcatatgcaacaagagagcggaagctgcgaaaatgtacaaagccatgtctgattctgtcggatgtcgtgtgtatcatttgtcgaattcgctatgcacagcccacagacgaaagctgctcgacaatatcataacggatctcaaggaaggacgccgcgtattgtgctttgcgacgcagcttgttgaagccggagtggatttttcgttcggatgtgtgataagactgctcgcgggagtggacaacatagttcagtcggcgggtaggtgcaacaggaatggcgaaagcgatgaaacatctcccgtgtacgtcgttcgtctgaaaggggagagaatggagcatctcgaagacatcaagaggtcgcagaacgccgcagaagtattcctttacagatatgaagccgaccctgaaatgtttgacagggatataatatcggaaaagtcgattaagttctattatgaacaactctacaaaaacgcaaaagtgggagcgtgcgagttcaccgtaagaaatctcggaatcatattcgatatgctttcgtgtaacaacggtttttgcgcgaaaatcgaaccgacccatgtaatgtgtcaagcgttcaaaactgcgggagacaatttcgaggtgttcgacgacgacacgcaggactttgttgtaccgtacggttacggaaatgaactcataacggagctgtcttccgaaaggtgtatgcgcgacttggaatacaggcgcaaaattataaaaaagtgcgcggaatacacggtttcgctgaggcaatatgaggtgaataggcttagtgaaatgcgggcgttctacactgtctgtgatggcggagtggcggttctgcgagaagggtattacgatgacagcttaggatttgttattgacggaacagataatattgaagcaatgttttcataaatttagaaaggagaaaagtcatggaggactacaaaacttaccttgagagcctgcctgttgtgcgcaacacagttgagttcatgttcacttccgactacggactgataacagatcccgtgtacaagctcggcggcgagaaatgcactctccagataccgacatacgaggcgataaagggcattctcatgtcggtgtactggaagcctaccataatttggtatatcgacgcggtaagggtaatgaaccgtatcaccaccgaagtcaagggtatgcgtcccatcaaaatgagcggcggaaacgacctcgcgtattacacatatctgaaaaactgctgttatcaggttagagcgcactttgaattcaactgcaacagaccggagcttgaagcggacagggacgaaaacaagcaccacaacatagcgcggaggatgattaaaaaaggcggacggcgcgacacattcctcggaacacgcgaatgtcagggctatgttgaaccgtgtgttttcggcgaaggagaaggcgcatatgacgatatttcaagactggatttcggcaatatgtaccacggaatcacctacgccgacgagtactatgacgaagatacccgcggaaagctgacggttagatattggaaagcctatatgaaatacggaattatagcttatccgaagccgtgggaatgcgaatacaccagagcggtgcgcaagatggatgtgaagctgttcgacgagggacacgagaacttcaccggactgaaggaatttgagaaggagggcggctatgggactacttgaaaaagcctgtgctacatacgacagtcagtcacatttggtcggagtgtcggtcgaaggcaaagaaatgctgtcgccaatctctcatatcacggtaaacgccgatattgaaatatgcataaacaaagacggcaagtacagcaaagcgacacgtgtcgtaaaagacgacagaaaaactactatccccgtaacaatggaatccgcaggcagaacaagcagtgccggtaagctgccgcatcctttcgccgatcagataaagttccttgcggattatcccggaagcagctatgcatactattttgccggacttgacaagtgggcagagtctgagttttcacacccaagcgtaagagcggtcagagactatattaaaggaaaaacaatactgtcagaccttgcaggagaaggcttaattaagctcaaagacggcgctcccgagaacgagaaagagcaaatccgttggagagtgataggcgcaagcgacactcccgaaacatggcgtgacagaactcttttcgatagctacgtttcgtactacgagagtgcaataagcgaattaccgaaagctctttgctacgtatcatgtgtagaagaggtcatagccgctcagtctccgaaaggcgtgctgtcatacgcgaacggagcaaagctgatttccgcaaatgacgcaagcggattcacatatcgcggacgtttttcaactcccgatgaagctgccgttatcggatacgaaaccacgcagaaggctcacgcggctctcagatggcttgcggcgaattacggcgtgacaatgggaaaccgtaccttcatatggtggaaactgccgcataaacaaaccgaaaacagctcggtaaacgtaggtatgtcgcaggactttattttcggaactcaaagacgtgatgaaaagcaggaatttgcggactaccacagtgagctttatgaaactctcgcaggactgaaaaactcgcttgagccgaacgacgacgttataaccgtatctcttgaagccgcaactacgggaagactgtccgtgacatactacagtcagctgaaagcggaggactttattgaaaggataaacctgtggtacaaggatatcacatattccgataagggctacgctccgccgataaaacagataatacagtgcgctttaggagacgagagggataactttattgactgcgacgctaagattctcgcggaaatgagcggagtaatgctgaaatgcgtcattgacaatactccgataccggagagcatagtattcccgcttgtaaaccgtttcggaaacattcaaaaatattcaaaacaaggcaatcgggcaagagtaagaaatacagctttctcggttgttagaaaatacagaaatcgaaaatataaggaggaatggaatttgggactcgacagaaacgaaaccgaccgcagctaccttttcggaagacttctcgcgctatatgaaaaacttgagagagcaacattttccgaagaggacagaacgaaacgcgaaactaactccgaaaggtacagagaggtatttgttcagcgtccgggatatggacttgccacatttgaaaagaagattcagccttataaaaagaagctaagaatcagcaatttcggcttgctaaactacttcgacagagaaatcggtgaagtaatgggcaagctcggcaaggagaatctggcaaacaacgaacgccttgacgaaaaatacatactcggctactatcatcagctttacgcaaaaagcgacaaaaacggcacggataacgaaactatagatgaaacagaagaaaaggagattgaacaatgagtatactgaaccataaaatcgacttcgcggcacttttgtccgtgactatggctaatccgaacggagatccgctcgacggcaacagaccgagaaccgactacgaagatttcggtgaaatttccgacgtatgtataaaaagaaaaatacgcaaccgcatgatggatctcggctatgacgtattcgttcagtcggatgacaaaaacaaagacggttacgccagcctcagtgacagagcactgaaaagccttcccaagacaaaagataaagatgcatacgcaaaaacggcgtgcgaaaaatggcttgacgttcgctccttcggacaggtattcgcgttcaagaccgacaatgtttccgttggcgtaagaggacccgtcagcatacatcaggcagtttcagccgcacccattgaagtatgctccatgcagattacaaagagcgtcaacagcgaaacaagcgataaacgttcatccgacacaatgggaatgaagcattttgtgcgctacggactttatgtgctaaaaggctcgataaacgttcagcttgcagaaaagactgaattcacaaccgaagacgccgacgtgataaaggaatgcctgcgcacactgttcatgaacgacgcatcttcggctcgtcccgacggctcaatggaagtcgtaaagctgtactggtgggagcacaactgcaaggaaggtcagtattcctccgcaaaagttcacagacttcttgaagttaagcagaagaacacctccgaaatccccaagtcgatagatgactttgagataacgctgaactctctcgacggtctgcactgcgaggaaatagccggctattaatcaaatccggaggcagaacatggaaaacgagcttctgatttcgggacttcagcatttctcgttttgccgccgacagtgggctttgatacatatcgagggcgagtggtcggataactattttacagttgacggacacattcttcacgaaaacgccgacgatcccttcttcaccgaaaagcgcggaaatgtgataatcagccgtgcgcttgacgtaaaaagtgaggaattcggcattgtaggcaagtgcgacgtggtagaatttcactcttccgacgacggagtaaagctcgcgggcagggaaggactgtggctgcctactcctgtagaatacaagcgcggagtgagcaaggatattgacgcggatagacttcagctgtgcgcacaggcgatatgtctcgaggaaatgctgtgctgcaagataatagagcgcggttttctatactatgctgcaacacgccgtcgagaagaggttcagctgagctctgctttgcgtgatgagaccgtgtcgtgcttgaaagaaatgcgcgagctttacgaaagaaagtacactcccaaggtcaagacaatcgcgaagtgccgctcatgctcgatgaaagatatctgcctgccgaagctgcaaaagtacaaatccgcgcgggaatacacggacacaatatggaatgacggaggcgaagtatgagaaagctgctcggcacactttacgtgacgacacctgacgcgtatctgtccctcgatggtgaaaatatcgttataagtgtaaaacaggaagaaatcaagcggattccattgcataatcttgaaaatatcgtgtcattcgggtatcagggcgcgagtccggctctcatgcgtcatgtgtgcgaatgcgggattggaatggcgttttttaagccaagcggtcagttcatgtgcagagttgagggggagcggcacggaaatgtcctgctgagacgtgagcaatacaggatagccgacgacgaaaaacgctcgctccctatagcacgcaacatgataggagcaaagaccgtgaacgccagaactgtgctgaaccgcttcatgcgggatcatccgatggcttacgacaacgaccgagtattgtccgcagcggaatatctgaaggagtctcttcccaaaatacatgaaagcccggataccgacacacttcgcggctacgagggagtgaacgcaacctgctatttcggcgtgttcgactcaatgattttgcagaacaaggacgttttctccttctccactcgcgaaaaacgcccgccgactgatccggttaacgctttgctgtcgttttcatatacaatactggcaaatgactgcgcgtcggctctcgaaagcgtcggacttgacccgtatgtcggattcatgcacacggatcgctccggcagaaaatctcttgcgctagacattatggaggagttccgcgcggtaatgtgcgacagatttgtattatccctgataaaccgccgtcagctgaacgcaaatgactttacagtgaaagaaaacgggacggtgctgatgggagacgaaacgcgcaagaccttcctcacggcatggcagaagcggaagcaggagacgatagagcacccgttcctcggtgaaaaagcggagtggggagttctgccttttgttcaggcacagctgctcgcgcggtacatccgtggagatatggatgaatatccgccgtttttgtggaggtaatatgcttatactgataacatacgacgttaacaccgagacggaagcgggcagaaagagactccgcaaggtggcaaaacagtgcgtgaactacggtcagcgagtgcagaactctgtatttgagtgccagctcgacgccgcaaagctgagagaggttgaagcaaagctggagtcgctgatagataaggaacgcgacagcctgcggatatacaatctcggaaacgcatacgaaaacaaaataaagcatatcggaataaaatcatcgtttgacgtaaccgagccgctgataatctgactccgcgaacgtgaagcgcacataaaaatcccggtgcattcgcgcaggaaaaacagcagcggcgaagtgatatagccgatgagaaaatgaggtgataaagaaaaaataggcagaacagcctgtttgtgtaaagtgatgctgcatacgattagtgcagtattgctgtcgtcctccacacgggggacgtggattgaaattgctccggcgtgagcttccttagtcgttcctttagtcgtcctccacacgggggacgtggattgaaatatacaaaatagccctaattttgtttgatagtgtcggtcgtcctccacacgggggacgtggattgaaataagtgtgcggcgttatccagcctattttaagtaagtcgtcctccacacgggggacgtggattgaaatatatattttgccttttgtataaacgctctcgttggtcgtcctccacacgggggacgtggattgaaataagcattcgcgggtagtcgagatttacgacctccgtcgtcctccacacgggggacgtggattgaaatctaccgtatagcagctgattcgtcgggatatataagtcgtcctccacacgggggacgtggattgaaatgcatttcgctgcggcaattcggattttctcctgctgtcgtcctccacacgggggacgtggattgaaattacctttgtaaaatcctctatccctgcatagttggtcgtcctccacacgggggacgtggattgaaatcagtcttccggctcaagttcggcaagtgccatcacgtcgtcctccacacgggggacgtggattgaaataaacgttctcaaaacggcaattcctcgtcgtcgggaaggtcgtcctccacacgggggacgtggattgaaataaacgttctcaaaacggcaattcctcgtcgtcgggagtcgtcctccacacgggggacgtggattgaaatcatcctaccgtacagcattcagcaagtatttcctgtcgtcctccacacgggggacgtggattgaaattttaacgcgtttgttgacggcaatagaaaacgtagtcgtcctccacacgggggacgtggattgaaatttttgtcagaagtcccattatttccagtctgtcgcagtcgtcctccacacgggggacgtggattgaaattgatacaggcactatatgatgtacgtttaattttgtcgtcctccacacgggggacgtggattgaaattgcttctataccttgttccattccgcaagcgtaagtcgtcctccacacgggggacgtggattgaaatggcagcacgggaagataatcgcaaattaaacaaagtcgtcctccacacgggggacgtggattgaaatctgaactcgccgcggaaacgaatgtccgccgttcgtcgtcctccacacgggggacgtggattgaaattgcaatggctctctggctctctatgagcaccgtgcgtcgtcctccacacgggggacgtggattgaaatcagcgttttgccgagggagtagaagaaaaagtctgtcgtcctccacacgggggacgtggattgaaataatggagcgtggattgtttgaaatcaaggaatcgagtcgtcctccacacgggggacgtggattgaaattcc

SEQ ID NO: 4580 - DNA, 5769 bp, Unknown
  16S sequences of unknown bacteria
acgcacaggcagcgatgaatgcgacgacccaggaagagatcgatgcggcagctgctgccttgcgcgaagcgcgcctgaacgcgagaacgagggcagatgtgagcgctctggaagagctgatcgcttatgtgaacagccttgagctgcgcgcatacacgagcgcaagcgcgcagccggtgatccaggatctggcccgcgccaaagcgatgctcgcgaatgaagaagtgacgcaggaagaggtcaacgacatggccgatgccctgcaggcttctgtagacaacctcgttgaggtcaacaacagcacgaatgctgaggagtcgacaaacactgctgcagcgatgcagaccggcatgtttgctggattgctggctttgactggcggtatgctggctgtggcaagacgcaaaaagagaaactgatcttgatctaaaggcagacgttttgatgagcgtctgcctttatctgattgggggaaggaaaaaagcattatgtgaattctatctgaaaatatggacgatgtgtcgtagctttttgtttattttatgttttttatgtggtaaacgctttcgaattctgctaaaattgccatgtaaagggaataccagtttttggcattcctgggaaaggaggagagacttttgaataagcaaaagtcaagtgcgatcgtaaaatcgctgcttgcggctgcgatgctcgtaccgagcttccaggtggggacccttgcggtcagcgccaatgaaggtacggatacgggcggagtatccaccctggcagaaacaccaatgaacatgaacctggcgctgaacaagccggttactgccagcgcggaatacggctctatgccggcaagcaatctgacggatgacgatgagtcaagccgttggtccacagaggctgacgctacgcagtgggccgtggtcgatcttggtgagatctaccagatgaacaccttctcaatgatctgggaaagtgattctgtttatgcatcttcatacaacatttatgtatctgatgatggagaaagctggggagaggctgtcgttgctcgcacaggcaatacggcaagaaattgtacggaaagcctcgctgaaccggtcagcggacgttatgtcaaactggaagtcacggcaatgcacggttatccgagcgtttccgccagtgatttcaaggtcatctattctgatggagaaactgtaccgcaggatccatatgaaaatgtggcactgaatggaacggcttcttccagctccaatgagactgctgatctggcggcggacaaggcgtttgatggtgatcgaagcacccgagcttctcgctggtcaagtaatactggcagcggaccgcattggctgtctgtggatctgggacagacccgcaacatcaagaccgtcatgctgtactgggagaccagaaaggcaacacattatcagatccaggtttccgatgatggctctgactggagaacggtcaaggaaatcaatgatcgtccggcaagcacgacggaccgcatcatcctggacaatacagaaagcgcacgttatgttcgcctgtatatcgacagcatcacggcacaggatccggatggcggcgtagaatggaacaccatttctttgtttgagatggaagtctatggcggagagatccaggaaagcgcaagtgatattgccaaccagatcgagattgctgatccgcagctgggagatgaaacgctgaatgtttcttatccggagacagaccgttatacgatcgagtataagggtacggattatgagcaggtcgttgatgaaaatcggcatatctatacgccgatcgtggatactgtggtcaatgtagccttcaagatcacagataacgaaactggtgaatatgagttcaaggagatcggcatcacgatccctggtacgtatacgcaggaagagggcgacaatgccgctccggatatcctgccggaactgcgtgagtggaaaggctctactggaaacttcactgtaagcgattccagccgcatcatctatgcggatgagggactgcaggctgcggctgaggaaatggctgcggactacaaggatctcacaggcaaagacattaccgtcatgcagggaaccagtgaagatgtgcaggcaggcgacttctattttgctttgaccgatgatacgtcgatgggcctgatggaagaaggctatctgatgaatgtcgaagatgccattacggttactgccgagacacagaccggtgcgtattgggcaactcgtacgatcctgcagggactgaagctgaacaacttcgagacattcccgaagggaatcactcgtgactatccgctgtatgagatccgcggatacatcatggacgttgccagaagaccgttcaccatggatttcttggaacaggtcgttaaggaaatgtcctggtacaagatgaacgacttccaggtacacatcaacgataacttgatcccgctggaatctgtatctgatccgatgagcgcatactctgcattccgtctggaatccagcatcaaggaaggcgacacgctgaccgacagcgatggcaatccagtgacgctgaacggagagaatctcgtctatcatcaggatctgacaagtacagacctcttctacacgaaagatgagttcagagatttcatccaggaatctcgtgagctgggcgtcaatatcgttcctgagatcgatacgccggcgcactctctggcactgacgaaggtattgccggaactgcgtcagggcacgagcggccgtcagaatgaccacctgaacctgatcggtgagtcttacaacgcttctctggcattcgtccaggagatcttctccgagtatctggatggcagcgatccggtatttgacgcacagacgatcgtgcacatcggtgccgatgagtacaacgcttcttctcaggcataccgtatgttcgtcaacgacatgctggaatatgtggaaggaaccggacgtaaggcacgtgtatggggaagcttcacacaggcagctcagggtgaagacatcaacgcagaaggcgttgagatcaacctctggaactttggctatgctaacatggatgagatgtacgatgatggtttcgacctgatcaactgtaatgatggaaactattatatcgttccgaacgcaggttactactatgattatctgccggacagcacgatgtacaatctggccatcaatacgatcagcggcgtgacgatccctgctggcgatccgcagatgaagggcggagcgttcgcggtatggaacgacatgactgactatctgtacaatggtgtcagtgaatacgatatctgggatcgtatctctaatctgccgctgtttgccgctaagctgtggggcagaggcgatatggatctgacccaggctcaggcagcttctgatgcactgggcgaagcaccgcgcacgaacttcggttacgaagttgacagcgcaacggatgaatacatcaacatgccgatggacacgctggatgatacatccgagaatgatttcgcggtcaatgaaggtgagaacgcttctatcgttgaagtagacggcaagaacgcgctgcagctcaacggcggaacaagctacatcacgaccggtctggagactgccggactgggcaatgacctgcgtgtcaaggtaaagcgtacttctgacagcacggatgatcagatcctgtttgagagcccgtatggaagcatcaaggccgttcagggcgacacaggcaaggtcggattcaccagagaattgtacgattactccttcaactacacactgcctgtcaatgaatgggtagaactggaattcaagaaccagcagaacgtcatcgaactgtatgtcaacggttccctcgttgatacgctgggtgatgatgagcagatccagggacgtccgatgcgtgcgacctgcatgttcccgatggcaaaggtcggaagcgagaccgatgcattcgtcggttatgttgatgatgtccgcctcggtgtgaacgatgatttcgcttctacgatggcactggattatgcagttgaaacggcaaatgcagtcatggacgctgagagcagcgatgtcctgcagccgttgatcgatcaggcaaaggaactgttcacgcagtatgctcctgacgcagcagcaatcgaatccctgaccgcacagatcaatgatgttctggcaggcatggattatgagaaagcagattacagccgtgtcaacgcatatctcgatctgatcgatgatctctccgtattcacggatgcgacagtaaagactctggagatggccgttgaggccgtacgtgaaaacctgccggctagcatgcaggcaacggtagatgcgtatgaagcagcaatcgtcattgcattggatggtctggagcttaaagagttgtctaatacgaattatgtagacagcagcatgcttgaagcgacagcatcttcttatcagcacgatggttcagatccgaaaaatgtattggatgataatccgagcacgatgtggcataccgactggaatgtgacaacgatgccgcattggatcgatctgcagatcagcgaaccgaccgtcgtcaatggtctgtattatctgccgcgccagagcggttcaaacggtaatgcaacttcttaccaggttcaggtcaagaatgctgagggtcaatacgaaaccgttgcggaaggtacgtggtcaagcaattcttctgcaaaagaagtcactttcgatgcagtagaaacgactaatgttcgtctggtatatgtacaggcagttaataacaatggttctgcggcagaaatcaaattgatgcttgctaatgtagagccggatgtagaaggactgcaggcagccattgaaaaggcaagtgcagtaacgaacaacaattatacggaagcaacatggaacgcgctgcaggctaagatcgcagaagcagaagaacttgctgccgctgaggatccagatgccaacgaagtagagatcatgaaggtagagctcgtcgctgcaacgatggctctgcgtctgagcgacacgatcgttgacgaggagccggcaagcgacgccgctatccaggctctgcgcgacatggtggaaaaagccatcgcactgggttccgaagatgaagcgctgaatgcagcgatcgaagctgcacaggccgtgctcgctgaagaagagccgaccgtgaccgaagtcgttaccgctctgctcaacctgagcgaagcgatgcaggcagtgaacgccggtgaaagcgtagacgcgctgagagaagatgtacaggccacgatcgacttcatcaatgagaatatcttgaatgatgctgaaggactccgtccggccaaggtgcaggcgctgagagacgcagtcaaagcggcacaggatgcagtggacaatcctgaagcagacgctgatcagctgaaagcagcgaataaagcgatgaccaaggcagctcaggagctgtgggagatcgtgacgaaggctgagctggaagcactgatcgaagccgctaacggctacctcgatggtgattacacggcagaaagcctcgaagcactgcaggcagcgatcaccgcggcacaggcagtggctaacaatgatgatgccacaacggcagaagttaccgaagccatcacgaacctgagcaatgcgatcgccggactggaaagcatcagactggataagagcgccctcgaacatgagatcgagctcgtgagcgaaatggtcgctaaccttgatgactatatcgcaagcagcgtagaaggcttagcagacaagctggctgacg

SEQ ID NO: 4581 - DNA, 32759 bp, Unknown
  16S sequences of unknown bacteria
acgcttggcggagtattcttctcatgaggcggagacgcagcaggatggcgcacaggcgctggaggagtaccggcaggcggcagaagccggggatgtggacgccatgaaccatctcgcgtattgctataggtacggcgagggcgtggaacaggatttcgcgcaggccgtggagtggtaccggcgagcggccgaggcaggcagcgatagcgccatgctgaatttgggcgtgtgttacggtttgggccgcggcgtggagcgggattctgcgcaggctgtggagtggtatcgcagggcggttgacgcgggaaacgtggaggccatgatgagcctggcgtattgctatgaaatgggccgcggcgtggagcgagacggcgagcaggccatagagtggtaccggcaggcggcggacgcgggcagcacagaggcgatgcttcggctgggagaacggtatcaggttggcgatggcgtgcagcaggattttgtgcgggccgtggaatggtaccaaaaggcagcgggggctggagtcgcagaagctatgagccacttgggggattgctatttctatgggcagggcgtggaaatggactacgaacaggccgtagaatggtatcaaaaggccgtcagcgcgggaaatcccgcgggaatggccggcctgggaaattgctatttccgtggcgtaggcgtagagcaagattatgcgcaggccaccgagtggtaccaaaaagcgtttgaaagcggcgagcgcaatccgcaagcaatggcgaatttgggctattgctacgaatttggccgtggcgtaacgcaggattatgaacaggcgctggagtggtatcaaagcgcggtggaaggcggaaattcggatggcatggtcggtttgggccgctgctatgagaaagggaaatgtgtagagctggattacgggcaggccatagaatggtatgaaaaggcggttgaagcggggaacgctgatgctatgctgaatttggggcgcctttatgagaatgggtatggcgtggaacaagattccgagcgtgccacggaattgtatcaggcgggtagggcggtgtatcaggaagcggccgaagctggtgattttgttgcaatgctaaaattgggcgaaagttatgagtatgccaatggcggagtgcgggatgacgcgttggcggccgaatggtatcgtagggcggcggaaattgggaattcttacgcgatgtataagtatggatacttctttgagaaaggccgtggcgtggagcaggactacgcgcaggcgctggagtggtatcaaaaagcggaagaaagcgaacctggaattgctacgaaagccattgcccgggcagaagaattgcttgcccaacaggcctgggaagcgctgaacctggaagatggcgatagcggggaagccgtgctcgatttgcaaacgcgcttgattgagctgggctatttggcgcagggagaaaatgatggcgcgttcggcggcaaaacccaggaggcgttggaacgcttccagcgggatcagggctgggagccgacgggcgtcgccacggcggaagtgcaggaagcgctgttcgccggcaatgtaggcggcgaagtgaacctcgcactggcggcgaagtggtatcaacgggcagcagacgcgggaaacgccgaagccatgagtcgcctgggggattgctatttccatgggcgtggcgtggaagtggattccgagcaggccgtggaatggtaccaaaaggcggttgatgcaggaaatccctcaggcatgaccggcttgggagactgttatttctatgggcgtggcgtggaagcggattccgcgcaagccgcggaatggtaccggcgagccgctgaagcgggcaattcgggtggcatggccggtttgggtcgctgctatgcgggcggctatggcgtggagcaggacgacgaattggccatggagtggtatcaaaaggcagcagatgcgggaaacgccgaagccgaggaacgcttggcggagtattcttcccaagaggcggagacgcagcagaatggcgcgcaggcgctggaagagtaccgtcaggcggcagaggctggggacgtggacgccatgtactatttgggcgagagttattttgcgggcgagggcgtggagcggaattatgcgttggcggtagaatggtaccagcgggcagctgattccggccatgtggaagccatgagccgtctgggcaattgctattttggcagcacgggcgtggaacaggactatgaccaggcagtgaaatggtaccgcaaagcggaggaggccggggatgccgaagccatgtatcgcctaggcgagtgctatttttccggtcgaggtgtgaagcaagactatgagcaggccgtagagtggtatcaaaaagcggcggacgcgggaagcattgcggcaatgcttcggctgggagaaaggtatcgagtagggcgaggcgtggagcaggattatacacaggccatcgaatggtatgagagagcgctggatgagggaagtgcggattccgataccgcgttcaataccgattatgtcagcacaaagctagtagaatgctattatttgctgggtgagaactacttcacgggcgacggcgtagagcaggactacgcgcaggcgctggaatggtatcaaaaagcggcggacgcgggcaatgctgaagccatgaaccgcttgggggattgccatttccatgggcgtggcgtggaagcagactatgcgcaggccatggagtggtatcaaaaggcagcggatgcgggaaatgccgaagccgaggaacgcttggcggagtattcttcccaggaggcggagacgcggcaggatgacgcgcagacgctggaagagtaccgtcaggcggcagaggccggggacgtggacgccatgaaccatctcgcgtattgctatagacgcggcgagggcgtggagcaggatttcgcgcaggccgcggagtggtatcgtcgagctgccgacgcgggcagcgatagcgccatgctgaatttgggtgtgtattacgatttgggccgcggcgtggcccaggattctgcgcaagcggtggagtggtatcgcagggcggtcgccgcaggaaacgaggaggccatgatgaacctggcgtattgctatgaaatgggccgtggcgtggagcaagacgatgcgcaggcaactgaatggtatctgaaagccgccgaggcaggtaacttagcggcaaaagagaagcaggaggaacgagcaagactttctgacgaaatgtatagatatgctgagtacttagagaatggccgtgacatagagcaggactatgcgcaggtgctagaatggtataaaaaagcggaggcattcgatcctggaattgccacggaagctattgcccgggtagaagaattgcttgccgaacaggcccgggaagcggcggaggcaatgcacctggaagacggggatagcggggaagccgtgctcgatttgcaaacgcgcttgattgaactgggctatttggcgcagggcgaagacgatggcgcgttcggcagaaagacacaggaggcgttggaacgcttccagcaggatcagggctgggagccgacgggcgtcgccacggcggaagtgcaggaagcgctattcaccggcaatgtaggcggcgaagtgaacttcgaactggcggcaaagtggtatcaacgggcagcagacgcgggaaacgccgcagccatgagccgcctgggggattgctatttccatgggcgtggcgtggaagtggactacgagcaggctgtggaatggtatcaaaaggcggtggatgccgggaacaccgaggtcatgctccgcctgggggattgctatttccatggacagggcgtggaagcggactacgaacaggctgtggagtggtaccaaacggcggcggatgtcggagatgccgcagccatgagccgcttgggcgattgttatttccaggggcggggcgtagaagcagactacgcgcaggccgtggaatggtaccaacgagccgctgaagcgggcaatccggatggcatggccggtttgggccgttgctatgcgggcggctatggcgtggagcaggacgacgaactggccatggagtggtatcaaaaggcagcggatgcgggaaatgcgcgcgcaatggcggatttcttggcgtattgctatgaaacgggtcacggcgtagagcaggattctgcacgggcggcggaatggcgacagagggccgcgaacgcggaagacgatgctatcatgctggaattgggccgctgctatgcgggtggctatggtgtggaacaggatgacatacaagcggcgcagtggtatcagagggccgcggaggccgggaatgaggaagccatgtattccctgggcgagtgctattccactggcagaggcgtggagcgcgattgggcgcaggctgtggagtggtaccgcaaggcgattgatgccggaaacgtggaggccatgatggaactggcgtattgctatgaaatgggccgtggcgtggagcgggattatacgcaggccatagaatggtatctaaaagccgccgaagccgggaattctgatggaatggttggtatggggcgcttctatgaatatggccttagcatagaacgggattatgaacaggcggttgaatggtaccaaagggcggcaaatgcaggaaacgcttatgcaatgtataagtgtgggaattttttcgaaaatggcagtgttgtaatgcaagattacacacaagcgcttgaatggtatcagaaagcattcgaaactggatatgaaccagctgcggacgatattgcccggattgaggaattgtttgccgcacaggcgcaggaagtggcagaagtagcagagacgggagacgccgaagcgatgaacaatctggcgcgttactatgctctcgggcaaggggtggaacagagcgatgcgctggccgtggaatggtatcaaaaagcagccgaggcaggaaatgctgaagcgatgaacaatttgggatttgcctatgaacatggcaagggcttagagaaggactatgcacaggccgtggaatggtaccggcaggcggcgagagccgaaaacggcgctgcaatgcgaaatttgggagtttgctatagttttggccgcggagtggggcagaattttgcgttggccgaggagtggtatcgcaaggccatagacgctggaaacgttgaagccatggtgaacctggcatactgttatgaatatggccttggcgtagagcaggatgaagctcaggcggaggaatggtaccagcgagccgccgatgctgggaatgccgatgccgtgaactattatcataatggcaatgcggaaatgcgtaattataggcaggtgccttatacgcaagcggattggtaagaaagcgaggagtaacgcggaaggtttatcgaatggttgctttatgcaaggcggactgtgaattggagtctgttcaaactggaggcggaattggaagagcagatggaaggccggggagaagaagatccggaatatcacgacagccgcaacggctacaaacccaagacgctgaagtcgagcatgggaggaatccccattcaggtaccgcaggaccgaaacagcaacttcgagccgcaggtggcgccgaagtacaagaaggacatcggcgagagcgaggggaagatcatcgcgatgtacgcacgcgggatgagcgtgaacactgctttttaaaagggggatgggcttgttgcggtgagcggtttaagcaccgggatggaacgcggcgttgcttgccgttggagcacgagcgccaccagaggcaggcaaacgcggcgaagcagcctggcgaaaggcaaactggtatctttgcaaagcggcaaaagctatgattcaaccgcaggaacgctcttgcggcaattgcgcgtaggattgaaaaacatttaggaggtatatgacatgaagatgaggcacaagtggattgcgctgttgatggcattgatgttgtgcgcggcagcgtttacgccggggtttgcgcaaacggtggagcaatacgagcaagaggccgctgcgggaaacgcggaagccatggttcaactggcggggtgctattattatggggaaggcgtggaacaggattatgagcaggcaatagaatggttacacaaggcagttgatgcgggcaatgccacggcaatgtacaacttgggatattgctattatacgggtcgcggcgtggaacaagattgtggcaaggcggcagaatggttcgaaaaagcggccaatgcgggcctcgccgatgcaatgaatgccttggggtattgctactatatcggccagggcgtggagcggaattatgcgcaggccgtggaatggtatcgcaaagccattgaagccggaaacgttgaagcaatggtaaatctggcagtttgctatgaaaacggccagggcgtggagcgggattacgcacaggccgtcgagtggacgcgtaaggcggtagaaacaggctatgccctagcgatgaacaacttgggctactattatgagagtggatatggcgtggagcaggattatgcacaggccgcagaatggtatcaaagagcggcggaagctggcaatgctactgcactgaacaacctgggccgttgctatttctatggatatggcgtagaacaagaccaggagctggcgttagaattgattcacctgggggcagaagcgggagatctcattgcaatgggtaacttgggatactgctatgagaatggtgagggtgtagagcaggattatgagcaagcgctgctgtggtatcagagagaagtggatgccggatacaaagcggcggagcaagatgtcgcccgagtggaagaattgctggcagctcagggtggtgcggttcccgatgaaggggattcgacaagcgaggatgcaggcgaatcgatggtccgggtgcttaaaaaaggcatggaaggcgacgatgtcaaggtgatgcaggagcggctcatgcaactgggctatgcactgccggagcacggcgcgaatggcaattttaaccaggaaacgcgtgaagcgctgcaagaattccaaaaggatgagggactggaagtggacggcgtgtatggcgaaaaatcgcacgccgcattgctggatgcatatacgagttttcagttggaaaaagcagctgcgtccacgccagggcccgtgactcttccgtcgacagaatgggaatgggtgctggagccgtttatagaggcggatgacattcagccggttgattccgtatctagtttggtggaaactggaatgaatggtggggtaaacaaccatatgcaggaagaaatggccctttgggtggatggcaaggttggattgatagattatcagggcaacattttgatcgaacctaaatatgagaaactatattactttgcgcgtgatggtatatatatgttaagggcaaatggatgcgattatgcgtatatccatggatcaatccaggagattgatgttcaggactatatcgtagaagatgactacatagaaggggactataatgggtttaactattgggatgccgaactgcaacaaaccattcatttagactactatgacccctattataatagcagcagtggatttaaaatttatgatagaacaattgtgcgagaggattactccatcgagaaatggaacagcacgttttttccggaaggcggctatgggttggcaatggacgatcaacttctaattccaccgcagatggaatatggatttgcttttggaagcgcttatgtattttgggatggggatgggtggaactattacgatttaaatggacagatgatcattgcggattgcgaagaggcgtggctacatcgaatggatgacaaagaatatcgctatactggggctgagctaccattcgatttcagcgaaggtcttcttgcctatggtcaggatggaaaatggggatattgcgatgagaagggccaaattaaggttccccaaatatttgaggctacgcggcctgtgaacttcgctggattggcatgggtgaaacagggaggcaaatggggcgtaattcgcgcacttcctcgctttgaggcggagcaatttatgtgcacccttttggaggatggcagcgtgcgcattgagggatacatgggaagcacaaatacactgcaggtgccagcaatgctggcgggatgccctgtgcgagaaattggcgcaggtgcatttcaacactgctcaacgctgcaaagcgtggaattgccggcatggttggatacaataggagacgaggcgttttcctattgctcctctctgcacagcatcgaattgccggaggggctggcaacgataggcgacggcgcgttttactggtgctcctctctgagcggcatcgaattaccagagagtttgacggacattggcgatgatgtgtttgcttggtgccgcgcattgagcagcgtcagattaccggaaggatggacggtgattagtgatggcctgttttccggttgcaactctttgcgtagcatcgaattgccggagggattgacggaaataggcgatgaggcgttttcttattgttcctctctgagcagcatcgaattgccggagagcctgacagtgataggagatggcgcgttttcatggtgcctctctttaagcagaatagaattgccggcagggctaccagagattggagcgagggtatttttagagtgttcctctctgaacagcatcaaactgccagaggaactggagacgataggcgatgaggcgttttccggttgttcctctctgcgtagcatcgaattgccagggggattgacgatgataggtgatgaggcattttctggttgttcctctctgagcagcatcgaattgccgacggggctgacaacgattggcaatcaagcatttattggctgcaactcgttgcgcagcatcgagttgccagcacaattgaataatctggcgccaggcgcgtttcgttcctgtgagaagttggagacattcagcgtggttcccaatcataacatatatgctacggtggatggaatactttatgagaaggcaacgcaaacactcattgcgtatcccgaggggcgcggggcaacaactctcattgtgccagaaggaacccgagcgataggtgataaggcgtttttcgggtgtccatctttgagcagcatcgaattgccagagggactggagacgataggcgatgaggcgttttcccgctgttcctctctgagcagcatcgaattgccagagagcctaacagtgctaggcgataaggcgtttttcgggtgtccatctttgagcggcatcgaattgccagagggactagagaggataggcgatgaggcgttttcttattgttcctctctgagcagcatcgaattgccagagggactggagacgataggcaactatgcgtttgctgattgctcctctctgagcagcattatattaccggaaggatgggcggtaattagcgacggcctgttttcccattgctcctctctgagcagcatcgaattgccagaggggctggagatgataggcaactatgcgtttgctgattgctcctctctgagcggcatcgaattgcccaaggggctggagacgatgggtgaaggggcatttaaatggtgctcctctctgagcagcatcgaattgtcagagggactgacgacaataggtgatgaggcgttttctggttgcgactcgctgagcagcgtcgaattgcccgcagcgctgacagcgattgatgtcggggcctttcttggctgcaactcacttcgcagcatcgaattgccagagggactgacgatgataggcagaggggcgtttgcttattgcaatcttctgagcagcgtttccattccggtaagcgttacccaaataagcgaggaggtattttcgggttgcgatatgctgacactgacagtggagcaaggatcttatgcgcacgaatatgctgaaacgcacgacattccatatacgtatcccgatgcacttgactggctgatggactaaaagactttaagggcgcgggggcaattcacccctgcgcctgtattggtatttagttcgacttgcatataagaaaatttttaagaatatactaagagatgcattatataccagaattattcatggaaagcatgctttgttgtattatataaaatttaggcggatagagggggatgtatatcatgaagaaaaggaaatgggagcggtggatggctggggcgtgcttgttggtgctgctgggaagctttttctcgccgatggcggtaggcaaggcacgggcggaaatggattcggcggaggagattctgtccacgctgggaacatcacccgcgaagatatacgcgaattatatcacgggcatcgaccgagtggtggaggatgcggagggaaaattgctgtacgacgccatgctgtcagaaccggagagctattttctgtgtatgacactggacgatgatctaggcctatccgcggatgtggcggtttggtacgattatctaatggaaggggatctttcagatattagcgagcatcttatatcaggcagctatgaggcagggatattgctggatattttgctatccaactccaatgctttttcctctttagaattagaaacagggaatgtggattcccctaaatggctagaggagacgcttgacgcattcgaagcgacaaagacgatattggatcagccatatacagagccgcaggcgatacaaaaagcggacaaatggatagatgaactcatgaagactttgcagaaggaattgggcttaaaggaaaaaccacagatatcgctgtcacaaatgcaagtgtttaaggcggtagaggatttaccggtgggcctagtggcagaatttcttgtattgggattagagaatggcaacgaactaaagagaaatgtattgcagatacaagaactctatgcgcagcgcgattctatgataacacttttgcgcgccatacgagaaaattgtgtggatgacgaatacctgctggacggaattgatataatactagatgccttactgaaggaagatatatgggaaagcggcaggatatgggaatatatgcaaggaatcgaattgggcagtgatatggcgaatgaactgttcgctacagcactgaaaatgatagcgaatggaatacctgccttgagtgccgctttgtcagtgcgagaagtacttccaatctttatcaatctgctcgtttttgattttgatgagttcaatggacaggtacgcacggtggaggtgacggggcggtttgcagaagcgctgattgcgacagtgaagacgctaaacgcgcagtatgaggcgaacccgacagaggaaaacgcgcgcaagtgcgtggaagcatttgagatgatgtaccggttggctctatatgacaaggatttgtacgggacatttgctcagtctttgctacggtctggtgcattaaccgcattggtcaaggatgcatccggagagaagtactctgggatattggaaaacttggatgagatgcgggaggacattaaggatagccatgcgcgcgtagaacgggtggtggatgcgtatacgagctttcaggtggaaaagttgataaaagagtatgcgaacgttcaaaccaaaatttccgctggaggtctccgccacagcgctggagtgcgcacagatggcaccgtagtcaccacggagtatcaaagaagcgagtatgatgaatacgattttgatgttgaagattggagcaatattgtagcggtagaggcaggcggataccattgtgtgggtttgcgcgcagatggtagcgtggtcgctacaggagaggacatgttggggcaatgctatgtttctgactggagagatattatagctatagcggcgggagacctccacacgctaggactatattacgatggaacggtgctgggcgtgggtgaatatctcgatgggcggcttgatatcgaagaatggcatgatattgtggccatagcggcgggcgccgctcattctgttggcctttgcgcggacgggacggtggttgtggcgagcgataaccgaagtggcgaaggaaacgtttcgcggtggcgtgatatcgtggcgatctctgctggaaactcatatactgttggcctgcgaaaagatgggacggtattggctacgggttccaatggggatggacaatgcgatgtgtcttcatggaagaatattgtggcgatatccgcaggagatcgtcatactgttgggctgcgtgcagatggaacggttgtggcggtgggatataatgataccaatgcgtgcgatgttgatcactggacggatatcgttgcggtttcggcaggctatggctataccatcggtttgcgcgcggatggcacaatggtggctacggattctgcatttagcggctgtgatgttaccgaatggcgcaatattgaatgctctctgaacgctagacaagtggaaattgatgtgaagccgcaagcggatgaaaagtattttgaatatacactactggcagacggcggtgtccgcatcgacagatatacgggcagagcggaaaccttggtcgttcctgcgaccttgggcggccatccagtacgggaaattggtgcggaagcgtttcaaggctgccaaacattggtttctattgcacttccagatgggatcgtttcggttggagaaaaggcattttatctatgcgatgcattgcgcaacgttgaattgccgaaaaatttgaattcactgggagacggcgcgttttggttgtgcgagacgttagaaaaaatttctcttcctgatggattggtggaaatcgcacctttcacattttggggttgcaagaagttgacgtctatatccctacccgcaggattgatctccattggtcgggaagcatttgctttttgtgaggcgttgccatctgtaacgctgccggataatttgctttccattggtcccagcgctttcgcgcattgcgcttctttgagcgaactcacgttgcccgacgcgctcgaatcgataggcgaaaatgcgttccagaattgcgtttctctgaagatggtttcaatccctgatgggctgcgccgcatgggtaacaatcccttttccgcctgcgaatctctaatgtcgtttgctgtgccgcaagaacatccatgctatgcgacgattgaaggagtactctatgaaaaagcgacgcgtaccctgatcgcgtatcctgccgggcgagatgtgtatgcatttgaggttccagcaggcattgaggcgattgggaatggagcgttttccggctgctatttgctgaacgcgatttttttgccagatagtcttgtaagcattggggaatatgcatttgaaaaatgtgtttcgctgggggatgtcgcgcttccgacggaattggtgagcattgggagttgtgcgtttgatggttgtgaaagcttgcgttccattgtggtgccgaatggggtcacgatgggggatggggtattcaatggttgtgtatctttgcagtcggtaacgctgcctgatacattgacggttatagcaaaccacatcggtaatgcggatggcataaggcttatcccggtacacgaactccacgatcccatctctcttgaaataatcggtaaacttttttgcctgggcgccaaaatgtgccggcggcaatcctaccggcagttggatattgtagagctcctgcttgccgatatgacgagtctccagttcctccgcaatggcaatcagcgtaagtacaaagaaacgatcatcttccgtcttgtccttgcggaacgggatgcgctcgttggagagcgtgtagtaattgccccggtattgcaggctctgcccgaagggttttgtaatgctctgctgcagcccggaaacaaacgggttgcagtggacggttttgatttgcttgttgccatgatcaacaccaatcaacataggtagttgcctccttttttgctttatacatatcctttacgcctggatgacgcctttctcaacacataatttaaaaaagtatttttctgagtaatcttggtttgacatataattgtaaatttatttctacaagcccgtagaagcattgacttttctacaaggttgtagtagaattaaatcatccaaggtagacgtactttgggtaaggaggaagtgtttatggatcgatcccaaaaactatctgaaactgaatacgaaatcatggaggtgttgtggaaatcacaagttcccatgtcttcggcgcagcttgcatcgtactttgcagaacgccacaacaaggagtggaagccatcaactcttgcaacttttctgtctcggctgacgcaaaaggggcttattacttctcagcgagaaggtagagttccttattaccggcctatcaaatcccagaaagactatgcgcgagatggcgcacaaggaattttagatgcactctatgatggttcgatcaaaaatttctttgcggctttatacggtggctctcagatgtcagaggaagatcgtgaatctttgaaagaatggttggacaatcagtaataacggaggaatctgtatggtatcttacttgcttagtactctgttttttctgaatttaattgccagcagtgtgtacctggtttttaaagccttgctcgtttgggcaaaaaacggtgtaaatgagcgtttccgctatattgggtgcatcgctgtcatggtgttgtttttgatcccattttatcaggctttgctgatctcttctgcaacaaaagatatgccatctcaaacaagcggatacctggaaggcgttagcagcgttatcccaaaagacgaagtagttcaaaagaatacttccgtcactgagagcaacagcatgagaacaatcggttttggcttggatgttcagacacaggaaaagattttagttgtttggtctgttggtgtgtctgctcttgcattatggtatatcgctgtattgttgagattccgtaggaaactatcccaaaagcaaacacagcccgtttgtggtgagcttcagcgaattgcaaatcactgtgcaagcgaatatggaattcgacagacgccaatccttagagcatcgccacatgtacaaagtccggtgttgattggtttttttaagccaattatcgcagtgcctgctgatggacttccgccagcggatgtacaaatgattttgaaacatgagctagtgcactttaaacgccgtgatttgtggtggaaacttttgggcgtcgtaatacagacgattcactgggtcaatccaattgtgtggctgctttgtaacgattttgaattttatgccgagacatcctgtgatgctcaagtggttcataatcttgaccatgatgggcgcaaaagctatgggtaccttttgattctgtattccaaacctcaacgcaaattgaaccctatgccggggatttcatttatatcctcgcgcgaaaaactgaaaaggagaatttatattatgctgaatggaaataagtccaaaaagctgatcgctactgctcttgtttgcgtgttgggtgcaagcagctttgcactgtccgcatttgctgccgagatacaaagtgatactccgcagacaatcaacggaattgttgccggtaaggatgtgtctacaacttccagtgacgagctcctcaccggtgaaacgcaaacggatattccctttgctcaaagcatcaatccgaacaacggatacgatctcaaaggtaaagaggaaaactcctttgccgatatgctcaccacaacgatgaatgctcctattgaaattccggatgaattcagacagtctgtggcaaacggcgaagtcactcctctgcaagcagaggatggcgtttcagtagaggccattgatgccaacggtgttaagatgagtgtcaacaccgatgcggaacagtatgcattttgcgaccaccgtacagaagatgtctatgtccagcgacatctcaagtacacggatggttcgtgcaaggtagagttatactctggcgtccgctgtacaaaatgtgcgaaagtgtgggttcatgacctgctgagcaccacaactttcccgcagtgccctcattaaacgacatctattccaagagagcattaaattccacacgaaaatcacaggctggtttgcgcgttattaaccagcaagaaattctgatgaacgccatttctaccattcctttttgcaataacttttaatccgtcggttgattttaccaatcctgtgtagcttacatccgcggaataaaccaaaaaggtgcgaggcttattccctcgcacctttttggtttgactgcttaattcgcatttaaatgttatatattgacgctcaaaaatgttgtaaacttaaaccccctgacgcttagcatacagaattgtatttctggttccacctggctcaccagtgtatacggctatcaccagacctgagtgcgagaccatccattcatttcttttttggaagcaatatcgtgtatatgtctggcagacagcatatttataatctgccttgcttgcgactgtagcatacagattgcgccatttagcatcccaattttttttcaaatcccacaaaaggtgttgcacaaaccaattttatttccggattacattgttttcgcagaaggacttcttcaccagcccaaagatcccccccgcttccagcggcggttttgagaaatcaaggccgccgcttcttttttgctcggtgcaggatcggcgacccacggagggagccgccatgttcatacgacttgcttttcaacggaataacttctcaaaaaaagcctatctccaacatggggcagccccggccaagaatatgaactataccatgtaagaaaacttcatattgcttttgcattcgcccggtgggtctacgacctgccgggcgaaatttgtcgtttcctgcggtttttcggtgcgggccggagctgccgcagcaacatggacacagggggcggcacaaccggccccggcttctcactctcccgcagattgggggtgagaagatgaaacacatccctgatgattatggagaacgctgccggtttgacacctattgcaaggtggttcttcgcaacgaggccaaaaaccatctgcgagatttgagccgccagcggaaccgggaaaagtcgctggacgctctgacgcaggcggaattggacaagctctgcacggtgaacgaataccccagcgacagcatcctattcacggcctatggctatactctgcatatccgggacgagttggtggccgctgcctttgtcagtctgccggaacaggagcaaggcattttgatcttgcactatgttttggaactggtagacggtgagatcggcggtcttgtgggaatgtcccgcagcgccgtccagcggcaccgcaccaaggccctgaacgaattatagaaacgattagaggacaaaaggaggaaaccgaaatgaaacagccaagtttttgtggacgggagctgttgcccctgtctgtgatcgaggcagcccgcgctggtgatcctctggctgtggagcgcgtcttgcggtattatgagggctacatagacaagctctgtacccggacactctacgatctggacggttcgccccatgtgcgggtggacgagtacatgaaaacccgattgcaaagtaggggagttctttttcaatgactgtttggcattgaccaatatcgatttgccgtcgggaattgtaaccattggtacaggtgcgtttatgaagtgcccgctgatttctgtcgcgttgccacagggcctagtgtccattggcgatagcgcattttcgcggtgtacaagtttgtgttctgttgctttgcctgatagcgtgctagaaattgatacatatgcgtttaatgggtgcaatcagcttattatgaccgttgtggaaggttcttacgcacaccagtatgctattgaacagggaattttctatcgatatgcggatgctggcgagtagctatatgcaatgcccgcatggatgatagatcccggcaagataccaagaagtctaggaatagagtccatcgcgcgcgagctagcgctagctcgcgcgcgaattgcgcgccgcaaagcggttctaatgggcgcaagccattttttctatgcgatcaaatacgtcctccgggaacgtttctgaaaacatggcgccgcagagttcccatgcgatggcgcggggcagatcggattcgttgaacagcacggagcggatggtcatgtggctggcaaggccgggaagaatccgcttctgcatgactgcaagcgccttttccactacgcgggggcagtgtacataatcggcagcgttgataaccatttcgttgggattgaacaggctcacaaggtttgcaaggccgatgcccaggtattctgcgcagtcgtctatggcgctgagggctttccgatcgcccgcttccgcgaggcgcgtgagggatttgagctgctgaagaggctggccgctctcgcgggcgtacagttggagcattcgcgcgggagaacacatggcctccagacagccatggttgccgcaggtgcacgcgtcgccatcccgggcgacggtggtgtggccgatttcgccaatgacctgaggaatgcgaacgccatcctgaatgagcgccgcgcccatgccctgagcgatgtcgataaaaagggatagcccggaattgttttcagcgctgcggcggcaaaaccacagacccttggtgaaggtactgttggagatatagaggggcatgtctatgatttcggtcaggtggcggcggatttccgggacatcccactggagcgtggcggaaatcacctgacggccctcgtccagcaccatggcagaaaggaaaatcccgacgccaatagcggttttgccctgtggggagcagaacatttcttggatgccgccgtacagaagctccgtgatggcttccggcgccagatcctgcatgcggtattccatgtgggcaaacacttcacccgcaaggtcggtgaggaagatgtgcagcatgctgcctatgtggctgacggtaatgagacggtaattctctacggcaaagcgcaatagcacgcttttgcggccggaacggctcacgttttcacaattggcttcctttacaaggccattttcgatcagatagctgacgatgttgctcacagacgcagcggaaagccccgtgcgctcgcagattgcgctccgggcaaccagattgcccgagcgaatcagatccagaacccgcaagcggttgatgcgctgaatgcccttgctgtttgccgataccgtcttttgcatacccatcccacaattcttttgttattaaatgattatagcataggatttccatggtgtcaattttattgttgacgaaatagaaaaatggtaggcaaataacgtgcaatttaaatttcgcaaatagaaatctttttgcaagtattgacaggggaagggggattgtgctataatttttttaatgaatgaaataattgtgcatttagcggatggacgcaatcttatttataaggagttgagcggatgaaaaagaagattttgaatgtgggtgtaatttcctgcagcgacatggctcagagtcatatgctggcggtcaagaatcacgagcaggcgtgcctggtcgccgtttgcgatgtggatgaagaaaagctccgcgaagcaggcgataaaatgggcgtagaagccagatataccgattaccgggagttgcttcgccatcccgggctggatgcggtgatcatcgtaacgcccgaccagctccacagggagatggtggaagaatccctgaaggtcgggttgcacgttttgtgcgaaaagcccctcgcccttttgcgcgaggatctcaatgccatcgttgccgccagcagggccagcgacaaaaagctgatggtgggacagatttgccgtttcacccccggctttgccaaggccaaagaactgattgacgccggggaattgggcgatatttactatgttgaaagcgaatatgcccatgattaccaagccattctgtcagaaaacggctggcgcagcgaccccgaccgcaacggcgtcgtgggcggtggctgccatgcggtagacctgttgcgctggattgcgggcgaccctattgaagttaccgcctatgcaaaccacaaaatgctgcccatcgtgccttacgacgactgcacaatcgctatcctgcgctttgaaaatgacgtgattggcaaggtatttgtatccaccggctgcaagcgcgcttacaccatgcgctcctctttttatggcaccaaaggcaccgtcgtgtgcgataacacctctcccagcatcaccttttacaagagccaggaggagaatcccgctgaactggaggaacgcgagatcgaggttgatatcgcaaatcacaatacctttggcgagttccgcgcctttgcagacgcgattctcaatgacaagcccgttcctaccgatgcgctgcagggagcgaagaccattgccgcttgtatggccatcgtgaattccgccaacgagcgccgcaccatcgcgccggactacaattttggttaaacgacagcgcctttgggaaaccgcatacagcggattcccaagggcgcatcccatttgcggcagatgaaaaaacgcgcgctgcaaccgggcggaccggtatgcgcgctaaggcaaaagccgccccgcgcgcatgcgcagatagttcaggctggggcggaagccctcggcgtattgcgcgccgcactggaagccgcgcaccttgctgcagcagcgcacgaaatccagaaaatcaatgtggtcatggtcgcgcatccagtcgatctggctgcggtggcaggccagagctttcagcttgatttcgatggtatcggttatgtccacatattccgtgggcgtgaagtttaggcccgaaaccgtgtccatatggaacacggggcccacgtccaccggcggctcctgcgcctgcaagtcccaatggggcaggctggcgcagaacgaggcgcgcatcagcgcctggcaggcttgcacatggtcgttcatatagtcggtttccgcgtgcgtgatgataacatccggccgggtttcgcggatgaccttggcgaggcggttgactagcgcgtcgtcatccgcagtgacgtacaggtcgttggcgttgatggaaaagtgccgcgcgccgatgatggaagcggcttcctccgcctccgcaaagcggattttcgccagttcgtcctgcaggatttccacgtggcccaggtttccgttcgccacatggcaaacggaaacctgatggcccatctgaacgtattttgccaaagtgccatagcagccgatctccagatcgtctgggtggcagccaacagcaaggatattcatatgcgcgcgcctcctcaatcagttgcattcgggcagcagcggtccggccagttcctggtcaaagaacagtttgccgggcagcgtgggcatgaaggtagagggaatccacatatccggcccatagcgcagcgtggcccagaaggacagcccctgccactgcatgccgcgcgacagcgtgccgtcacagccgccaatggcataatccgcctgcagaaacaggccggggccaatggtgttggcgcgagcaggcaccagcgtggtacggctcttgaagctggtgatggcgttctgctcgatggtgagcgggtgcagttttgcgccgaggcggtgggtttgccgcttccattccgcggcgctgtggaactcggcggcgaaatgcggctcccagaaggcaatgtggcacatgcggccaatgccgtaaacgagaaccagctttgcgccctgcgcgcgcaggtcggcaatcttgttaggataggtgggcaggtttgtgcgggtggcgaaattgcgctggttggcgggcacggtgagcgcgcccagaggattgaacagggcctgctccatggaatactggaaggaagccttgtcggttgctgccagggtattgccctcgccgtcggcccattcgtccatgttgaaggtagtgacgtgctcgcaggacacgccccattccttcaggaaatagaccacccagcgatacatgcccatggggccgacgggcagaatgatggccagcttgcggccttcttcgcgggtcagacgaatctgcatggcgatctcatgccccatgtaaacgtcaaaatcggcgagcgaattgcagggaacgggctgaaacgcatcgttccaggcattctggcgttcgagcacggtttcgggcgtgccgatgcaggcgtccattttggcgagatcccaaccagcggggaaaaagccctctagcagggagccggacagggtatccatcaggttcatacaaatttcctccttgcggttgtgctgcgcgatcacagaccgatcagctttccttcgtcgttggattggtatgcggcctcgataatcttctgggcgatgacggcttcctctgcggggacctcgaggggcgcgtcattgaggatggatagacagaagctttccacctcgcgggcataggcgttgccgaattccacgtcaagatgggtcttggcggcccgactttcgtggctctgtccggcgtcgtaaccgcccacatctctgagaaacagagcgtccacgctgccgccgtcgacctgaccgatcacgccgtttccggcgaggcgcccccgggtgccaaagaattccaatcgccacagggaagcttcatcgggaatgttgaaattgctttgcacggttgccaacgcgccgttttccaggcgcataatcagtgttgaactgtcctccacatcgtaatggaaggtcagggtatcgtgcatggcggccacctggcggacgttttgcccggtgacatagcgaatcaggtcgatgcagtgcacgcccatgtccatcagcgcgccgccgcccgcactggcgcggctctgccgccaggaaccgggcatatccggataccagcaggtgaaatgggcaaagcaggataccacatcgccgattttgccttccgcaatggcggctttcatggcctgcacataagcgccaaagcgcatcatcaggccggcggcgattttaacgcccttttcccggcaatgcgacacgacggcttcgccttccgcggcagtcatggcgaggggtttttcgatgaggatgtgcttgccgttgtccgccgccagcgtcgcctgccttgcgtggcaggcgacgggcgatgcgatgtaaacagcgtcgatttccggatcgctcagcagcgcggcatcatcggaatacgcgcgctttgcatggtatttttcgcgcaggcgctcggcaaatgcgggatcgatctccataacggaaacgatttccgcgtgctcggccaattgcattccaggcagggtgcggcggtcggcaatgccgcccgcgcccagaattccccagcgaacctttttcatggggcgcacctctcattcgccccgctgcatctctgcgatggaagagagaacggcgtcggccatgtaggtcaactgctcttcgctcaggccatacaggggcagatgcgtgaagcggttgaagaatacctcctcgcacacggggcaggaagcggcgatctcttcctgggtgtagccgaaggtcttcatgatatcaaagtgatacagagggccgaagtgcggaatttcggtaacgcccttttccagcagctttgcgcgcagggtttgcatgtttccgccggccttcgcgggatcgatctgcagaagatacaggtggaagctgggcttggtaccttcatcgcccagcggttggggcaggatggcgtcgcacgcggcaaagcggcggtttaggtattcggcagcgccgcggcgttcggcaagaatcttgtcgtagcgggccacctgctgtgacaggcccagcgcctgaatttcggtggtggagcagttgccagcggcgaaggggccgtatttgccggggatggcgacgacatcgtagagccagttgggaatcttgcgggtgaaatccgcgccgaagaagcgcgcgcgcttcatgtagggcttcatttcgggaatggtggtgatcagaatgccgccttcgccaaaggaggtgcaattcttgacctcgtgcagggagaagctggtgaaatgggcaatgttgccgattttcctgcccttgtaaaccgcgccgaacgcatgggccgcgtcttccagaacggtgatgtcgtgtttggcggccagatccatgatgggatccatgtccacgggatagccgcccagatgcacggggacgatgatcttggttttgctggtgatcttgcgggcaacgtctgcgggatccatattcagggttctgggatctaggtcagcgaacaccagctttgcgccaacggaaagggggtatgcgatggtggcgataaaggtgatggcgggaacgatcacttcgtcgccggggccgaggttcacatatttgtaggcgatttcaaagccggcggtgcagttggtgatgaaggtggcgtcggtggtttcgagataggcgtcgcaatcggcctcggcctgctcgaccttgctgcccagcgacagctttccgggcgggacgctcagcttgtccagcgccagaactttttcgcgaaccgcggcaagggctgcctcgtattcttcgccctcgccctgcatcaggaactcaacgaccttcatcaggtcttcggcattgtaattttcgccgacggcggcccacggaaccttggtttcgccggtgttatagcggaagtcggaagctttctttgccatgattcatttcctccagaaggttgttgatgttattcttcaagcagcaatttgccataatattcgggcacatggaaacagggggtgggcaccgaagcgggatcaatggggaagtagcagccaaaatggggagaggcggtttcgtccccgcacttatagaagttgccatgcaggatttttccgggggttggcacaaagccgggcatgtggcgccggaacagagcaaacggaacgatgagatccagcgcccagcgatcggcatacacctccgccctcagtgcgattttttcccgcgggaaatcgctaagcacaaattccgtgtctgaaacgccccagccaagcagcagcgcgccgtttgcgttcatttcaaagttgaaataaccgtcggccgccgtttcgccgggcgcgacgaagaattccatgcaggaatcgcaccagacgtttccgttgggctgctttacccggcgcaggggatcggcctctcggcactccatcagcacgcggatgccgttttccgtccagccggcccggaaaacggtttccgggcggtaggcgcagccccagggataggtttcaatcttcccgggcagcatttcggacggatcgtgggtgtgcctgagaacatacagccccgttttaccggccatggcgcttgcgattctccccgaggattgcatcccgctccatttcccggacgcggcggaaggcttcgcaggttttcacccaggtcttttcgggattcttggccgcgtagtcgttggactcgctgccgtaatagccccacgcgatgatggtgcgcgcgccggcgtcgtaagcggcttcggtggcgatgacgatctcctcttcgcgcccgcggggcgtgttgtaggtctgaatccagatgttgtggtccttaccgtattttgcgctgacgtccagattcgccttggtattttcatagacgaaatcatagactttgttgttggtgacttcggggaggtgcagccagtaggggtcggagccgatgttgtcgagattttcgatggagcagatgctgtccagcgtgcccagatggatgccgttctcttcgcccagcatgacgcacacgacgtttttcatgcccttgagcgcggaataggtggttacttcccggaagtagcccgcgatggtatccaggcggaattgggccacatcgtcgttgtaggtttccggcatgggatagccgtatttttcctcaaaaagctttttgcaggcagggcaggcacaggaataatagtccttgccgttgaccgtcttgtggggcagatggggttcatcccagaaaatggtgcggccgccgatgaaatgcacggcgtcgatccattcccgggagaaggcgcggaaggcctggctgttcaggcacacacgtaccgggtccatatcgccattggagtagacctgatgggcttccggatggtaggagagaaagtgggatttgtcgccgggcgggcctgcgagcccccagttgtccacccaggattccagaccgacttcttcggaaatggacaggatttcccgcattttttccttgtggcggtcccaatcggtatgggagaacatgtggacaaccagatccatgccgttgcgcatcatgtcgcgcatatcctcgcgggcgtggtggggcatgcggttgccgtgataggcggcaccgaggataaggggtttgcgttccatagttcagatcctcctttgaggtagtgtgggaatggatggaaacctgttaataaaattcttgttctacattattgcatgcgcgcaagtttgcgtcaatagtcaattttgaacggaaatagacaataatccatctttgttgtaaggatagacgtcaatatcgatatggggtgatggaatgtatagggtgattttggcagaggacgagccgttggtgcgcatgggcatcaagagcatggtggactgggaaaaactggagatgcaggtggttgcggaatgctccgatggggaggaggcatggaaggcctgcgaggcgtaccggccggatctgctcattaccgacattagaatgccggtgatggacggcatggcgctgattcggaagattcgcgccgtggacagccggatgcgcatcctcgtgctcacctgccttgaggactttgcctatgcccagcaggccattgagtacggcgtcagcaactatatcttaaaactgtcctgcaccgtggaaaagctcaccggcatccttggccgcgtgcgggaggaattgattggcatgaacgtgaccggcgacaaaaaccgggacatggcctttctgcccatccgcgaaagcatgttttttgattatgtatgcggccgctgcatggattgcgaaagctatgttcgcggcatccgggaggcctgcatgcccattccgctgggccggatttccctgacggtcatgcgcctgctggaataccagcgctttctccgggaggatcagagtgggcgcacgctccggcacatggttcgggaacttgtggaactggctgtgaaaaagacttgcgtggcggaatgctattgcgaccatcccggcgagtatgtgcttttgttcgccgccgccggggaagaggagattctcgcccgggacaatgcccttatgcgcatcagcgacctggtggacgaatatctgaatttgggaatccgattttcaccggaaaacaccgggaatggctatgaggaactgccccagctatatgccagggccctgcagcagatgaccagcgccccggaacaggattatccgcggaaaatcaccgccgcccttgcgctgattcgcaagaattacgacaaacccatcggcctccagtccgtggcggatgaactcgaggtgagcgccggatacttaagcaggttgtttgtttccaccatgggccgcacctttacggacgccctcaattgtgtgcgcgtggagaaggccaagcagctcttgcaggacaaaagcctcaccgcctacaaaattggcgagatggtgggcattggcaacgcaacgtatttcatccgggtatttaaaaaatatacaggtgagacgccaaatgaataccgcagcaaatgttgttaattgcattcgccggatgcttggcagtatccgggtacggctcctgctgttcgttgtcgtggcgctggcggtatcgctgatgctggcagggctgaacatccacgtggtcgcgggcggcatcatggatcgcatgcgggaaagcaccattcaggccgaaatcagccaaatttgcgacaaccttgtgagccagctagacagcgtcagcatccagatgaacaccctccaaaacaacagcgacctatccgcgctcatgagcaatgtggttttctccatgctcgacgaggtgcagattcgcatcagcttccgcaaaacggtcatgactctgtttaccagctttccccagttcaaatccgtgggcctgtattcggtgcaggacgagtgcctcatggtgttttcctctaagagcgtgcaggactattgcggcagcgatgccgtaggatggatacgggatctatataaagaccagcgtctgggcgagatgtgctttttcggcggagaagaggtgcagtatggctcgcccctgatgaagcactttgtcggcagcgggcagatcatctgcacctgcctgaagatccccggcggtatgctgctccttgcgtatgaggagcaaatgttggcggaccagtacgatgcccttgcccagatgaacgggcacagcgtgtatatattcaaccgcgaggggaccattctctcttctagcgataaggctgctatccgtagcgcatatctgacgcccgagacggagaacctgcgtgtataccgtagaacactggaacacagcaatttggaatttgcctgccatgttccctcggacaccggctatgcggcggaactggaaagcctcggcagcatgacggtgttttccctgatcatggcgtttcttgccactgcggggggctttctcctctgcctcaaccgcatgatgcgccccataagtggcatggccgcgagcatcgctcatgtcgagcggggtgactattccgtgcatgtgaatgcgccgggttccgatgagttgtcaaagctggcacggcagtacaacggcatgctcataagcctgcaggaactcaccgatgaaaatatcagggtggaacagcagcggcgcaattccgaactgcaggctctaagaaaccagatcaacccccattttctctataacactctcaatgccatcaaatggatggctatgatggaaggcagcaaaaaagtggcggacagcctcgcctccctgggcgggctcctttcgccccttctcaaggcctccaatcccctgtgcgcccttcgggaggagatagagctttctcggaaatatatggcgctcatgaacatgcgctatatggcggaaacgcccatggaagtccatattcccgaagaattgatggacgcggcggttccgcggctgtgcttgcagcccattctggaaaacgccatcctgcacggctttgcggcggagaagaaatggggccgtatcacgatatgcgcttgggaatcggaagggtacctgcaaatcgatgttttggacgacggcatgggaatggcggacgacgccattcaaaggctgaacgcgcgcctggaaagcggcgagcagagcgaccgcatcggcgttatcaatacgaatatgcgtattcgcctgcattatggcgaggattgcggcctgcgcataatggcaaaccccgacggcggactgtgcgtacggtttaagatgcgccacttgtcaatcggctaaagaccacgccttgcaaaaatccacttattttgatggaaaaggtcaaaggaagtggattcttgcgcgtggcggtggaatataggaaacctttaggatggaaataccgatttacaaagctataagccaactgtataatgagaatatagaatttttgttgcgaaaaggggctgtggctatggtgtccatattccaaaggaagaaccggcgcaagtggatgctgatgttgctggcattgccatttgtgattcacatcatcgctatccgctatgtccctctggcggggtggacgctggcgtttttcaattataagcctggcaaggcgctcgacaagttgccctttgtcgggttgaagtattttgaactgatcggcttttacaaggaagatgtgatcaatgccgtgatcaacaccggcgcgctgagcggcctgggcgtcctgttttcctggtttcccatgtttctggccatgttgctcaacgaagtccggaaccggtactggaaaaacggcattcagaccgtcatcacgattcccaacttcgtcagttgggtcatcgtatatgccctgtgcttcagcattttctccacggaaggcctctataaccagcttttccacaccaacaatacgcttttgacgaacaaggataccatatggtattttatggaagggcttacgctgtggaagagcgcgggctggaattccatcatctatctggcggccatcgcgggcattgatgaaagcctgtatgaagccgccatggtggacggcgcaaaccggttccagagcgcgctgcacatcacgctgccgagcctgatgtccacctttatcgtcgtgttgctgttgcagatcggttcctttatgagcgcgggctttgaccaatattttgcgttttccaacatcatggtgcaatccaagctggaagtgatcgacctgtatacctaccgcattggcatgaagaccatggactattccttcgcaacggccatcagcatcctacagtccatcgtatcggtcgcgctgctcatgttggtgaacggattctcccggctgacaagaggggagggcataatatgattcaatcccgttctccaggatcaaagatttcctacgggctgatttatctgttcctggcggcgtttacgctcctgtgcgcctaccccttttactacctgattatctataccttctcggattctgcgcgggcagccgcgggcgtttcgttttatcccaagggatttaccttggacaacctcaaaatggttctcgccatggataccattccgcgggccctaggggtgagcgttgccagaacggtctgcgcctccgccctgacgttgattggctccagcttcttcgcctacttgatgaccaagcgggaaatgtacctacgcacctttttttaccgcttatgcattgtttccatgtatgtggccggcggattgattcccacttacattgtttatcgcacgtatggtctgaccaacaccttctgggtatacatccttcccggcgttgtcacaccctactatgtggtgttgatcaagacctatatggaatccattcccaaagaactggaagaggcggcaatcatcgatggagcgggcatcctgaccaccttcgcgcgggtgatcattcccgtttccaagcccatcctggccaccattgcggttttctcggtggttgccgagtggaactactggttcgatacccatatttatatcgtcgatgaggaactgttcaccctacagtatgtcctttatgatttgatgcaggatgcccagcgaatttccgagcaactggcgcgccggatgaacggccccaccatcagcaccgttaccgtgcgcatgaccatcaccttcgttgtcacggtgccgattcttctggtgtatccctttatgcagcgttacttcaccaagggcctcatgctgggcgctgtaaagggttgattgaggactttacggctgcggccgtaaacgatatggatcccaaatattaggataaggagtgtatcgatctatgaagagaacccgcatcgcattgctgctggcgctggtcatgcttatgtccgcgctgccggtggcggcttctgcagaagccgaagtcgtagacctctacgtcacctacattgacggttttaccgcactcgaacccgatgccgaaccccgcagccccatttttgacgaaattgagaggcagaccggcgttcgcatgcactacaatgttgtgaccggcgaccgcgcggacgttctaatgtccaacggcgaactgggcgatatcctcatgatctataactcttcggatctgatgaccgcgattgaaagcggactggtcgttgatttgagccagatggttgcggaaaaagcgcccaacatcgccgccaatgcggatcgtgtgcaaatggcgcaggttctttccggcaccgaggatggaacttactattttctgccggttcaaaccggttccgaaggcgcgcccggcacgccctatcattccctgtacctgacccgctgggatttgtacaaggaactgggcagccccgaaatcaccaatctggatgaatatctggatatgctgattgagatgcagaaactcgagccccagaccgctgacggcaagaccgtgtacgcctacagcctggtgctgagctcgattcgcgacgtcgcttggccctggcattacaccttcggctattacacctccaacgactttatcaacaccaacatcaacaccggcgaaatggtctatgagccgctggatgaggactccccgttctggaacagcctggccttctacaacaaggtttataaggctggcctgttcgatcccgatagtttcacccagaccaatgacgacaaggttgccaaggccgccaatgggcaggtactgtgccccgtctggaacagcgacggcgttgcttttgaaacggccaattcccccaagggattccaggtattgccggttgagggaaccacctactggtgcaattcctactatcccggcggctgggacgcgtgcttcgtaggcattaccagcacctgctcggatccggaagcggcgctccggctgctggacttcctgtccaccgaagatggcgcgcgtctggtctacagcggcgtgcagggcatgcactgggattatgatgaaaatggcgttcccatgctggaggaaaccgtgctcacgaactatatggaattgaacgcggactggtatgcgctgggcgcccaggatggta

SEQ ID NO: 4582 - DNA, 2172 bp, Unknown
  16S sequences of unknown bacteria
acgcaagcgtaatatgccggtgttccttgtcaatcttgatgggggtgatcgggggcgcccgcgacaatgtggacgagaggctcggcgatgccctctcgctcgtctcgaagaggcgaaacgcggacatgtacctcgactggtgcgtggcacgcgcctggtcgtacgcggcggcaggaaaggtcgaccggggcgacgaggtcatctcggaggcaatgaacatggtgcggttgagctcgcatgcaatcccgcgcggcacgtcggtactgccgttccagagcaaggcgatgctcgcgcttctacgcgacgacaagaagacagcgctcgaggcgtatctggagttcgatcgcatcggcgttcccgagacggcgtacgcaacgctcgtgagacgctatgtggaactcgcctgctcggagcaaggcgatcccgagcaggctttgggcgagctcgtggatgaggtgcgcgcgaagggatactgcctgctcgagctcgacctgacgatcgacctcgcgatgctccgctaccagcgtgggcagcggaccgctgcgacgaggctgctgcacgaagtgctcgagtacgcagtcaaggaggaagtcgtgagcccgtttctctggcgggcgaacaagatcaggccgttactcgtctcgtatgtgacctcggtgaaggcgaacttcgcacgccgcatgttcgtgcagcgtcttttgaagcgccctgagttttccgtgatgggccagggcgacgcgctcgagctcgtggggctcacgaacagagagcgcgagattctcgggcttgcgatggaggggctcacgcggcaggagatcgccgccgagctctgcgtcggagacagcaccgtcaaatcgcacctctcgcacatgtacgcgaagctcggcgtcaagcgcttcaaggacctgctgtcgcttgcgtccgatctgaacctgtagccgtgccccttacccacgtgcgcccacgcgcaccaggaaatgacacgatacccacggtccctcgtgccaacgtgaaccgatacccacggcccctcgtgccatcgaggcgaagcgtcccgcgcgctattcgttaattgcctcgagaaacgcctcgccccagcgctcgtccttggccgcgcccacgcccgatacctgcagaaaatcctcgtgcgtccgcggtttcttgcggcacatctcgtgcagcgtgtgattggaaaacaccatgtaggcggggatgttggcttgcgctgcgagctcggtcctcagttccttgagctgggcgaacaaggcggggtcgggaggcgcttcggtaccggcacccgctcgcgcggccgctggcgccttgggctggggcaacatcagctcgaagtcttctttttgatgcaggaaatctgccgctttctgcgtgaagaccaccacgggatacttgctctggccgatatcgagtatccccttttccacgagcccgtcgagcacctcccgcacgtgcttggtggaatcgtcggccatgatgccgtaggtcgacaggctgtcgtagccttccgtgtgcatcttttcggccttcgacccgcgcaggatgtcgacaatcgtcgagcgacccacgcaacggccacgctggcccaatcgggccacgcagctgatgatcttatttgcctcgagcgtgacgtcctgcgggacaaagttggtctcgcagttgctgcagttaccgcaaaagcccggcgccgactcatcgaaatagcgcaagatgaactggcgcaggcagtcggtcgtcgtgctgtagaaggtcatcatcttaagccggtctttggcacgtgctcgaagcctctcgcgcagggatgcgtcgaggtctgtcgcatcgtcgaagctgttgttcagtaagaactcgcaggtatgcacgtctttgggcgcgtagagcaaggtgcagtcggccggctcgccatcgcggccggcgcggcccgcctcctgatagtagctttccaagtcgagcggcatgttgtagtgcaccacgaagctcacgttgctcttgtctatgcccatgccgaaggcattggtggccacgatgatctgtacccggtcgtagacgaagtcgtcttggttggcggcgcgcttctcgggagtgagccccgcatggtagcgcgtggccgaaaagccttcgtcttgcagcttgtcgcacacctgctcgacggcgcggcgg

SEQ ID NO: 4583 - DNA, 27761 bp, Unknown
  16S sequences of unknown bacteria
ccgccaaccacaaggatctctttcacgttttctccttcctgccccagcttcgttttactgcgcctgcgttgccaggtccagtttcttttccaggcataccagccgtacatcgggaatcccgttgaacacgcatggcacaatgccaggctcccgataacccaagctggcatacagccgccgcgcgccccggttcatctcctgcgtatccatgcgcaggtacgcacagccgtgggcgccagcatactcttcgtaaaaggctacaaaggccgttccgtagccccggccgctgcagcgcgggtccaccaccagggtgtggagcaccatgacctcattctcctgcgccgggtattcccatgagcacagcgcgtactccggcacctgagtctgattgatgatagccgcagccactacagccccctcttcctcttccacaaagagatcctcccgcgccagcgcggcaagtgccgtctggcgcaccggataaacagagcggtcccatccgatgcacagcgcaccggcttcttcagcgtcatggaccgcttcataaatctgtgcgaccgcgtcaatatcctgcatggttgcttttcgtatcaaagatattctcctcccagtatcccgtgcatcttccatatctgcctgaatagggcaagatccgtcacagaagatcaagttataatgtatattaccgcaaaatccaaccgcgaagtccaattcaatcttttatttcagcttctcccaatgacacgcccgccttgtctttccacgcaacgcgtccattgatactgtagccaaccaccatacccgcagcatacgatgggctgctaaaaggccaatcctgcgtaaaggtatagtttgcgtcaataattcccatatccataagctgctgacgtttatgaaaaatggatcgcgccagggaagacgccgtgttttgcgcaattctggatcctgccagaatcgcaaatccatccgatgtctgtcttccccgggcctctgccccggttcgatcttttaaacagaaaatcggcgcatgtttgccaggcacattccccacctgcgtttcaagaaccttatgccccaacacaccgagaatgagacgcatattatcaataaattcatccatctccgcccgatccatctcagaaatcgaagactctgtcggcgtattcgcattaatgatttcataccgctttgtcgcctttgcgatgcagtataaatgattttccaaatatttgatatgcgctttgttcaaattgttgtctttgctgataaaggcaacgcattccgtccaaaaatctttgtcctgcaaatgctgcttaagccgaaccaagatgttttctgtttctccgatataaacttgaggccgttcgctgttttcattctgtccaaacaggaaataaactcctgtatactccaaatcgattctatctgcacattgattaatgtaagtgcgtggtattttatacgcttttcctgtccaattggacagctcgcttacccatctgccgtccggaatcccatcaattaaaaattgtcggatagttttgccccgcatcgcttatccctcctttatcatcagtgttaccgtctccacatggtgcgttcgcggaaacatatccaccgccgcagcgcggtgcagacgataaccagatgcagcaaagcgctttacatcccgccccaatgtggccggatcgcaggatacatacaccacccgcgccggatccatagccgcaacagcatcaattacctccggcgccagccctttgcggggcgggtccacaaccaccacatcgggccgcagcccctcggcggcgcatttttgcgccatttctccggcgtcgccgcagaaaaactccacgttggaaataccgttgcgcacagcatttgctttggcgttttcgattgcttccggcacgatctccgcaccaatcacccgcccggctacttccgccagggccagcgtgatggtgcccgcaccgcagtacagctccagcgccgtttccccgcctttcagattcgcaaattccactgccagcgcatacaactgttcagcctggtcgcggtttacctgataaaacgacggaaccgacagcgcaaacacatggccgcacagcgtatcctccaattctgccgcaccccacagcacacggtaatccggccccaaaatactgttgcccggccgcgcgtttacattcagcacaatgccggccgtatccggccaagctgtccgcaccgcaccgatcagcgcatcctctgcaggcacgttttttcccgccgccaccaggcacaccagagccgctccattctgtgctgtgcggacatagaggtggcgcagccagccctttcccgtctgctcatcgtaagcattcacctgatgctccgccatccagttccgcactgccgcggcgacccgctccgccgcctgactttgaatcaggcagtgctccacttcaattatctgatggctccgcgcacggtaaaacccgatttgatgcggcggcgccaccggatactgcaccttattccgataatggagcacggaaggactcgggagaatgggaagttctggcggcgtctggccgcccaggcgctccagcgcgtcccaaactttctgccgcttggcggaaagttcttcctcatagtccatatgccagaatgcacagccgccgcacttcccaaagtaagggcatgccggttccgcacggtgcggtgaggcgcggcgcactgccaccacttttccaaaggccgtatttttcagtaccctcatcaccagtacgtcgcactcctcgccggcaatgccgccatggacaaacaacacttgtccatccacccgggccacacccagcccttcgctggaatagccggtaatggagacggtatagacctcattttttctgatcacatccatggcagcgtttcagcactcctttttcggcacagcgcccttctttaagtctttattttacaataagaaccgctttcccgcaagggtttcctctcccccgtgccaaaacggcgccggggattttccccggcgccgtttatccggcttacccgctgaaatgtttgaagcagcacagaagcttctctgctctgtaatgcgccacgcttccgtctcagcggtcccacttttcaatcagcgcccggatctgatcggcaaatttgcccagatccttgttcgtgccgcctttgttgtggcggataacctcctgcagcagaaggcccacgttctccagtctctggtatgcagcagaacctttatccgcaggcaccgtctttttccgttccggcgtataaccggcggaaatcatgcggttctccgccagatcgtacacctcggtatattccggcgcatgaaccggatagccccgatctttcagattctgcgcaaacaccggcgccacatccgcgtcgccgtgcactacaaacacatgctccggtcttggtgcaaacgcgccgatccattccacgaggttcgacagatccgcgtgagaggacatcccttcaaattttacaatgcgggcgtgcactgcgatctcttcaccgaaaaggcgcaccttatccaccccgtccagcagccgcgcacccagagatccctgcgcttgataccccacaaagcaaatggtgcattcgctgcgccacaggttgtgcttgaggtggtgccggatgcggccggcatcacacatgcccgatgcggaaatgattactttcggcgtcatatccatattcagcgccttggattcctcgctggtggaagtcatcatcaggcccggaaatgtgaacatattcacgccgctctgcaccaacgcgatggcttcttcatcaagatatccccgcagatcgccggaaaagacctccgtagcctcccgggccagcggactgtcgatatacacagggaaattcggcacagaatgcaccatgcccttttctttgatttcgcggataaaatacaacaactcctgggtgcggcccacagcaaaggaagggatcaccacattgccgcccttgcccagcgtttcgtcgatcaccgccgccaggccttcggtatagctgggcacctcgttgtgctcccggtcgccgtaggtgctttccatcaccacatagtcggcccggtgcagcagcacaggatcccgaatgatgggctggcgcatattgccgatatcgccggaaaagacgatggttttggtaacgtctccctccgtcagcgtcagggtgatgctggcgctgcccagcaaatgacctgcatcggtaaacaccgctttcacaccatcacacaaagccacttcctcgccgtactcgcaggtgtacagatattccttcacctgcatggcgtctgctacggtataaagcggctccacttcgcgcttgccggcacgctggcctttgcgattgagccacatggcgtcgctctcctgaatatgggcgctgtcaagcagcataatctccatcagctgcgccgtcagccgagtggccagaatccggccgcgaaaaccctgacggatcagcagcggaaggcgtccggaatgatcgatatgcgcgtgagtcaccagcacataatcaatcatcccgggctgaaacggcagcgccccgttgtcgatctcatcacggccctgctgcagcccgcagtcaatcaggatcttttttccggcgacctccaggcagtggcagcttccggtaacacagcggtcggcaccataaaagctcagtttcatcactggacctcctcaaccgataaaattcgggtcttctttgttcaaattataccatacttcccctgcctctacaagtcattttcgccgttttgccatatcccgctgcagaataaatcggccgcaggatgtcaattgtaaaatatgtaaaaaatccacgaaagaatctgcaattattctctgtttctgtttgggaaatctctttgccctaccgcgggcctttgttgtataataaatagtaaaatcaggggcaaagcggactttttcggtctgtccccgtccatatccggcggacaagcctgccgccgggcactttaaaacggaggtatcttctgatgatatttgatgacaaactgcacgaagagtgcggcgtattcggcgccgtggtcaacaaccgcgaagcgtcgggcctgacctacaatgccctgtccgccctgcagcaccgcggccaggagggcgcaggcatcgcctctctcaacggcagtgcgatcctctatcacaaagatcttggcctggtcagcgaagtgttcagcaaaagcgtgctgagccgcctgcctgagtccaacatggccatcggccatgtacgctattccaccaccggagccaactgcgtgcagaacgttcagcccgtggtcacggagtacctccgcggccgcctggccaccgcccacaacggcaacatcgtcaacgctggcgccatcaaagagcgtctgcagtcttatggctgcgattttgccgccaccaacgacaccgaggtcatctcctccctcattgcctacgaggccctgcacaccgattccattgagcaggccgtcatcaacgccgtccgccagctgcggggcgcgttctccctggtcattctttccagcaagaacaagctcattgccgtgcgtgacggctttggcatgcgcccgctgtgcctgggccgcagcgaccatggtatagccgtggccagcgaatcctgcgcactggacagctccaattttcagtttgagcgggatgtcaaaccgggtgaaatggtcgtcatcgaagccgatggctctatgaaatcctccattgttctggaagagaaccgcaccgctttctgcctctttgagtatatttatttcgcccgcagcgactctgagattgatcatctcagcgtctaccaggcacacttcaacatgggccgccagctggcacgggaatttcccgtggaagcggacatggtctgcggcgtgcccgacagcggactggacgccgccgcaggctatgcttttgaaagcggcattcctttgggatccggttttaccaaaaaccgctacattggccgcagcttcatcttccctacccaaactcaacgcgacaacgctgtgcgtctgaagctcaatcccctcaaagctaatatccgcggcaagcgtttggtggtagtagacgattccatcgtccgcggcaccacctctgcccgcaccgtaaaaatgctgcgcgacgccggcgccgccgaggttcatatgcgcatctccgcccccccttttacccacacttgtcattttggtacggatattgatgatgaatccaaactgatcgccaataagatgagcattgaagaaactgccaaatttattggtgcagacagtttgggctatatcagtattgaaggcattaaacaagcctgtgacggctgcagcctggatctgtgcaccggctgcttcgacggcaactatcccatggatatcggacaccacaaaaaatccgaattcgagtgttaatcatcaaaaaaacaggaaaggggtatcttcctatggcaaaaaaagcatatctggtattggaaaacggcacggtatttcagggcttttctttcggcgccgaggcggatgtaatcggtgagatcgttttcaccaccgccatgaccgggtatctggaaacattgaccgatcccagttattacggtcagatcgtcgtgcagaccttccctctgatcggcaattacggcgtgatccccgccgactatgagagcgcgcgctcctgggtgaaggcttacatcgtacgggagtggtgccagtccccctccaacttccgctgcgagggcgatcttgattccctcctgaagcagcagggtgttcccggcctgtggggcatcgacacccgccgcctgacaaaaatcatccgtgagagcggcgtgatgaacgcatttatcaccacggatgaaagcaaggtccccaccggcgcagagctgtgccgcccctatgtcatcaccggtgccgttagtgccgtcagcaattttgatgcatacgaaaccgtggaaaacggggagcgcaccgtggtgctgtgggatttcggcgccaaggaaaacattccccgcgagctgatccgccgcggttgtaaagtcatccgtgtgcccggctccaccaccgccgaagaagtgctcgcctataaccccgacggtattatgctcagcaacggcccgggcgatccgtctgaaaacaccgctatcatcaacgagctgcaaaaaattgccgactgcggcgttccggtattcggtatttgtctgggccatcagctgatggccctggccatgggcgctaaaaccgaaaaactgcactacggccaccgcggcgccaaccagcccgtgaaggaaattgccactggccgtgtattcatcaccacccaaaaccacggctacgccgtcgtatccgattccctgcccgaaggcgccgtgctcagttacgccaatgccaatgacggcacctgcgagggcgtggactacaccggtcgtcccatcttcaccgtccagttccatccagaggcatgcggcggcccgctggacacccggttcctgtttgataaatttatcgacctgatcgacgcccacaagggcagcaaggaggccaaaggcgcatgaatcacgaaaaagtcttaatcctggatttcggcggccagtacaaccagctgatcgcccgccgtgtccgcgagtgtaatgtgtactgcgaagtccatccctacaacatgcctttggaaaaaatcaaggcatataatcctatcggtattatttttaccggcggccccaacagcgtgtatgaagaaacctcgcctcatgtagacgccggggtgttccatttgggcgtgccgatcctgggcatctgttacggctgccagctcatggcctggtctctgggtggttccgtcactgccgccacggacgccactgcccgcgagtatggcaaaaccgaaacgtattttaccccctcctgcaagctgttccagggcttgccggaacacagcgtcacctggatgagtcacggcgactatatggaaaaagtgcccgacggtttttcgctggtggcgcacagtgccaactgccctaatgtggccatctgtgatgaaacccgcggcttttacggcgtccagttccaccctgaagtgaaccacaccgaaaacggcacaaaaatgctgcacaatttcctgtatgaagtgtgccatgccaagggcgactggactatgagcgattatctcaaaacacagatcgccgttctgcgggaaaagatcggtgacggaaaagtgctgttagccctgtccggcggcgtggattcctctgtagccgctgcgttgttggctcaggcagtggggcagcagctcacctgcgtatttgtcgatcatggcctgatgcgcaaaaacgagggcgacgaagtggaagccgcttttgccaaatgggacatcaacttcattcgcgtggacgccgaacgccgcttcctggataaattgcaggacatttccgatcccgagcgcaagcgcaagatcatcggcgaggaatttatccgcgtgttcgaggaagaagcccaaaagatcggtaaggtggacttcctggtgcagggcaccatttacccggacgttatcgaatccggcttgggcgacagcgccgtcatcaagagccaccacaatgtgggcggcctgccggattacgtggatttcaaagagatcatcgagccgctgcggatgctcttcaaagacgagacccgccagttgggccgcgagttgggtctgccagactatctggtcatgcgccagcccttccccggccccggccttgccatccgcgtcatcggggacgtcaccaaggaaaaactggacaccctgcgcgacgccgatgccattttccgcgaggaatgcgctaaagccggcgaggacaaaaacttgaaccagtattttgctgtcctgacgaatatgcgttccgtgggtgtccagggcgacggccgcacttatgactatactctggccttgcgtgccgtcaccaccactgacttcatgaccgctgactgggcgcggatcccgtatgacgtactggaccgtatcagcgtacgtatcgtcaacgaagtgccgcatatcaaccggatcgtttacgacatcaccagcaaaccgcctgccacaatagagtgggaataagaaccgagaaccgccaatccattgcgctgtaatggattggcggtttttctttgtgtatttgaccacaaaatgaccacatccaattaaaataatagtaatttcaatttgctaattttaaaggcatgtgttatgattattttactaattttcagagggggggaaggtttacgtttaatttcgctcgccagaaactcggggcggttcttctgcctcttctcaatgcaaaaaccaaaatcaaaagctcaaccttactgcaagggtatgcaacgttcatgacgatacaacaacacggcgccctcccggtgacacgtgatgacctcaaaaaatggggtggcaattacaaatatgggctgcttggaattgatttgccctcaaccactattacacgcaatgccttcgatgcatttacgtctgttcctatctatgaattcctcaggttcattgtaccagatcttgtagctgaaccccagaaattgttagagcaattctatcgacagtaggtcagcgtctcctcaacactgtcctccaccttcctggcggcctctttcagtttcatttccctcaactgggttaccacagctttagccttttcacgggcggccttcttgctttcctgagcgtggatcgccttgagcatcttggccactaattttactttggagcgaggaacaacggaaaacacattccggtaaaaatggaccgtacagcgctggtatttggcgtcaggaaatacttctcccgcggcttccagcattcccagacacttgtccccaacaacgagtttcacgccgtccaatcctctgcttttgagccactgaaagaaattcacccaactggccttgtcttctttcatgccctcggcagcacctaaaacctcacggtatccgtcctcatttaccgcgattgcaaccaaaatcgcaacattttcatactctccgccccagttgcgccgcaagtagatgccgtccacatagacatacggatatttgccgccttgtaaagggcgattccgccagtcctcaatgtggacataggctttcttgttcagctcactgatggtggccggagataccttgctgccccacagggcctcggtaatgtcctccacacggcgcacagagacgccggcaaggtacatctcaatgagggcttcctccacgctgctctcccggcggcgataccgctcaatgatggccgtctcaaaaggaacgcccttgagacgaggtacgtggagcgtgacatctccagaggtagtggtaaggttccggtcgtagtgaccgctgcggtagccctggcgagcttcgttgcgctcgtagcgggcagcctgggtcagcttctccgcttcctgctccagcagttcattcagcgtttcttctacgctgccacggaccaattctttgagctgacccttgattacttcctcgttcagttgtacaatcttctcggacatggtttacagactcctttcagaatggtgtgtggtaacttcattctaccagaggtctgcaaaccatgtctctttttatcctctattcaatttgcgcaacttatcttacattatcaacggtaacgctttgctgtggttcctctccgttgagttgtgcgcagctgcatccggatatacggcaagagaacgacggcggctgggagataatcccagccgccgttcttgcggttcaaatcgtgcaaacgagatcagttggaacctgcatggaaatactgatagttggtcgcgctcggtacagccggggcggtatagcctgggtcatgggttttcccaactcagttggcagatgcggcatggaaccactgataagttctgaaaacatcttgactgacagtagcattataggcgatcgcgccgcttccatccctgtcggtggaaacccgtgctgtgacgctttcacccagaatcggcttataatacatagcatgcataccttcagatttctcaccattttttgtcgcggtaccgctgaccgcagttacgcttcctccattgatcgttagtttattgaagtttgccgagatcccgcaactctttgcgtagatggtatagccctctggcgctgtcaaagccacatcaccgcccatcgcggtcacactgcccccgttgacaatgagattgttaaccgacaatccaatgctcgagccatcggtgcctttaccaacattctctttgttgatactgcctccggtcgtggtgatggttccgccgttgacagtcatgttgcccgccacacaaatggcaaagcttctaatatagcctgtgtcgtaggaacacgtaccagttatattgactgtcagacttcccggaccctcgatcatcagttcggagttctggatataaattccgctgctaaaggtggtatctccggtgtaggtcaggctgttgtttccgatcaattgaatggtcagggtctccgtgcctttatatccaaggcaggcatccccgatggtcgcaccagttatattggtggtgccctctccggtatagtggtaattattcagggtcaggatattcgtttccgcatcataagaaacggttccatccctgaaaacattttgcgcgtttccgcctgtgacctgcacgccgccgatccaaagatcatattccgtcgtatcctcgacccagtgggcgtaaagggtatgatcttccgtccgattcacagaggtgccggactcgaccttgctgccgccgtctgcttcagtaaaccagccggtaaaggtatggccctgccagagaggatcaggcagcgttccgtaggcgccgtcatatgtgacctccgcactgcttgggttaacactgccgccgttggcatcaagagtcacggtgtaggtgttggccgtccactgggctgtgaaagactgatcgctgtcaggcatggtgttgggcacattcggatcccaactggtaaaggtataaccggtgcgggtaggtacgggtgccgtaatggtcgtgccgtaatccacggttccgctggtatacgatccggtcagagtgccgccgttggcgttccagctcagggtgtactgattgagcctccattgggcagtaaaggtggagttttgatttggaacggtggcggggacctccggctcccaaccgataaaggtgtaaccttcacgggttggcgtaggtttcgtgatcaccgttccataatccaccgttccgttggtatacgagccgttcagggtgccgccgttggcttcccagctcaccgtgtacggaatcggcgtccacttggcgtagagggtcttgtttcccgtcgcatccgcagcgatctctttcacctgctctccgttgaaactgctgtcctcgtaccagccgccaaaggtatagcccgtgcgtgtggccggagccaaggtcacggcagtcccgtaggtatagaagaacgggttgggattggttgcgtcatatacattttcataggtgatctgataggtatttgccgcatcgctgaattgggcgtaataggtgacatctccaccaacggttgtgctttctgtcaagtccgtacccaagccgtctgcctctgtattccaaccggtgaaggtataggtgtggccagtggaggttttcgtaggggtgctgccgtcataactgggctttgatccgaacttcacatcgggatcggtctccagattctcactgccgttcatccatgtgaccgtgtgcctgttccggtcgtacttgatctcgatgacggtggagccgtccgcactgatcgctgtctgtgtgacaggctgtgccgtaaagccctcgtagctcttggcttccgcggcggtctgctggccggtggtgccggacttggtctctgtttcgtgctgagtgtagccgtcatcctccgtgttctgccagagatggttgacggtgtagcttgccccgccctccgtccagcgggcataaagggtgtgcgccgccgtcatggaaaccacagtttccggcgtgacctgtgtgccgctttcgtcttccgctgtgaaccagcccgcgaaatcgtagccggcgcgggtgggggcgggcagatcaccgtaggcagcgccgtaagtcactgttttgctgccttccacatccgtcaggacgccgcccttggcgtcgaaggtcacagtgtactggttggccgtccatttggcatagagggtcatggggccggaaacggtgttgtcgaactcccatgcccgggtacagttctgatcggtataccagccgccgaaggtgtggcccgtgcggatgggttcggtgggcgctgtgatggttgcgcccgtccggacggtggcggattcgaccgcgctgccgcccatagcgtcgaacacgatggtattgtcattgggcgtccactgggcggtatagtttgcgctttcggtgacggtcgcagggggagtcacattccagccgctgaaggtatagccctcccgtgccggtttgggcgcagccatctccgcgccgtatttgcagatctggatggtctgctgcattccgttattcagatcccacgtcacggtgtactggttccggttatagtacacccgaaccacggtggagccgtccggggcgatggtctgctcttcaaaagccctggcggtaaaaccgggatattcgttggcgctgtccgcggtcatggcctccgtggtgccctgcctggtttccgcggcactcagtttgtacgagccgttcagttcctccagatagtgctccacggtgtattgtgtatccgcgctgggaatccattttgcgaagagcaccataccctttgctttgagatcagattggccgagggcattggtaaaggtcgagggcatcgtgcttgtacttccggtatatggtttgctgcacgtgtaatcgatgtaccaacccgcgaaggtataaccctgtttcacaggatcctgcggccaggtgatggcggcacccacgcctccagtgagctgcgctacggcggaaccgcccatggggttaaagctgatgtaccgcagcccctccggatcgctccatgtgatatggatgaccttctggatgggctcggaggtgaaggacagcgcagccttcttccatgtaatggtcatgtcggtctcttcgttcaatgagccggtgggcggcgtgaccgtcacggtattgccggccgggtcgtagcggaaggccgggttagagaaggagatggtaaaggcgctctcgctgccgtcatcccgattgaccgctcccgtctcacctgatttcagatccatgtactgcatggtataggtggaaccgggcagagcaaggctcttgacggtcttaatgttgtagcctgtgtcatccgtcacggcgaaggcatagacattctgctgctcacccgccgaccacaacggccactcatgggcatagagggtaggcgcccaggtgagcttgctgctgttgaaggcctgtgccaaaaacttgatgtcgatatacattccgatctcgatgagcatggctccggcggaacgctcctccttcccctgtccctgcacccaacgcagatgatagaagaagtagccccaaagctgggagtaggccccgacatccgccacgatgccgatcttatccagatttagggagatcaggcccacatacatctccagccgcagtcccgcgcggatgccaacggtgcccaccacatagaaatcgaaattgtattggggcgtgatgatgtcaatggtctcattggtagcctgtctggacttcacacggacggaaaagttgtaccgtttctgggtggtatagtcaaagctcatacccatggacaccgccagattggcgctgaccacgaagctgccctttacctgccagcagaagatatgcaggaaggcgctgccgttgttttcaaacagcttgacgttgacgatctcgaaccatgtgtcattggcgttatccatcacgccggcatagatctccgccagggaatccatctcgccgtctgtgccctgcacgccgcccgcctcggcatagtcttccatgcgctccatgatggcgtccaactttgccgtcatggaggcgtcctcctcgtccccgcctgccgtaatgtcagcggtgaagccgatgccggtatagttgcccacatcaaaggaggcgttcaaagagtagtcatagcgcaggaagcctattttgtggcgcttggtgctgacgctttgccggaggatgatctcctcctcaaaggtggcggtgatgccgatctccaccttgtcgttgatcttcacagtaaaggggatactgatctccacgtcaaagccattgccctgcagatgatccagcctttggttggcgcgcaccttgatattgatgtccttagcgtcaaattccacctctaccttgtttccgtctttggccgcggcaacaacgccgctgtacggtacggcggaagcccgcatggttttcatggtttcctccacctgctcggggtccggcagctcgttcagttcgtcgctctccagcatcactgccgcgagatagagggcggcctcctcggcgtaaccgcttgcttccacgtctgcccggatctcgttttcaatctccgcctgctccgcgtcgctgacttcgatctccctgtcctgtgtgtagtagacatccagcgcggtttcgatgtccgcttctgttgcggaggtgtaggagatgacatagctgtcgccgttttgggtaaatttagtgatttttccataagcgcttgcagaggcattttcgctgtatgcgctgctgataaagccgatgaagtcgcctgcgtccagactgtccgcgtccacattttccatggctgtggatagattgtccgctgtgatggtaatggtgttttcgttgttgtccgtatcccagacgctttggatgggcagcacatcgggcataaagagcacatcctccacatcggccatctcatagctgtaactgccgctgccgttgacggcagtgatcttgatgtaggctacctcgccctcggtggaactgacatcgttcagatctacgctgccggaggtgacggccagggtatcgcccactgccagcgtttcagaacccgtgtaggtaaagctgccgctggtggtgttctcggcgctgcggccctgtccgtcgatctgatacagcccggcgaacaccgtgtccttcaagccctcggtgtcagtgaccgggatccgcttcaccccatcgttcagttgggcgtttttcacctcttcttttgcggtgaggagattcagatagcggatggacgcgctctgctcgccatcgtccagtttgaaccgcgccgcctcgttcagcagctccacctgataggtctgtccggcctccagcacagcggacaccttggaaccgctgacggtgtagtccacggccatattgccgcctgtgatattgatgaatttcacggcggctttgatattgctctctccggtcacgcccaccacgtcaaaggaataggtacccgcctgaagttccgtgcgggtcacatagtttggcgtttccatggactgcacttcttttcccgccgccgtcttggcatagagagtcatgttttttgtcacggtgtcgcccgtttccaccccgcgggtcagtccggcgtcatagtaccagcccaggaagatcaccccggccttggccggcgtaggcaggctggcgacgggagtgcccttcgcaacagtctgggcgttaggaagggtgatgtccgtctgatcgctgcccagcgcaaattgcacttcgtaataggtggtctggctcgtccctccgccggaggagccgcctccgccagaagatccgccgcctgtggagggcttttccggcttgacggtcggttctccgacttcggggtcgatgctgacccgctcggagggcacgccgggttcctgataccaggtctccaccgtttcgtccgtccgcatacacagtgtggccgcctgggcacggctggcattgcccgccggattaaagtttactccgtcgccgttcagaaggccggttttccacagcttcaagaccgcgtcccgcgcatagggggaaaccgtgtcgatgtccgcaggcgtggtggtgatcaccgcgccagtcgtatagtccacatcaaatttctcaaaatagcgcacaaaaaatactgccatctgctcccggttgatgagcgcattgggggagaacttcccgcctcccgtaccagccgtgaccccgtgcttcaccgcccatgccacataaggggcataataggcgtctgccggtacatcgctgaagctgctcacactctgatagcgatcggcatctactccagccatccgccccagcacagtgacgaacatcccgcgggtcatggttccgttgggttcaaaggtcgttttgctggtgccgctgaaaaatccattgacacgcgcgtactgcacagcgtcatagaaccagtctgtttccttcacatcggcaaatgggtttgcctgctcagcagatgctccctgtgtatccgcaacggcaaaagccgtggttgggatcagagagactaccataacaatcgccagcagcaggctgagtatccgttttttcatatcgtgcattcctcctccttggtcattttggaatcttcctgtttcaacaataacagcagccgctcgaattcttctgatgcggccggccgaatgtgtccccgttctcagcgggacaatccctcccccatgggggagggaaagggggctcgccccctttccctgaacacctctgctcagtcctcataaacggtggtcgagatctcgcctcccgcgcagtcgaaggtcacggcgtcggagcaggcgtaattgcctgccgcatcccacatctcaaagaccatggagtagctgccgtcgaacaggggtgcctctccaaaggccgtgtcggcggtgacggtcagttcctcagcggcgtacatctcaaaatcatcatccccagtgaaggtggcggctttccagatggtagtgatgacgtcgccctcggccagcaggcgcagctccttgctggccatgccggactcgtccagcccctgggaagcgcccaggatgctccattcctcagcggtaaagtcgtatgccacctgcaggttgtacgcctcgccatttaacaggatgggaacggagtagaggttgtaatcttcgccctcgaaggacagctccatatagaccagatgaccgtccagcgcgccccagacgccccggaaattgtcgtagaacacgccgttttcccagtcagcggtcaaatcgttgtcggtgcccagcaggagcatctggtcgcccgcctcgtccacatagaacagagagaagccgatgcccgccagaacatcgttggcttctggcccgagggtcaggaaggaggtcccctcatcgtccagatccagcggtgcgccgtcccagtccatatcggccagcgtgacccgttccggcagttccccaatatccagggaactgagatattcctcgccgtcctcggccagctcgccggtgagctcgtaggcgtacagatgcttgaacgcggtgctctcacccacggtgatatacccgttcagatcgtccacatcgccgttgtaggaatagtagcagctcagtcccgtagcctcggcccgatagggaccgcccacctgatagattacacaatccgtcagcgcgtcacagaccctctgggcggagggcagcatccatgcggtctgtcgggccagatggcccagatccaccatgttggtgtagccttgctcccgggtgttgccgccgtagttctcactccgggcggcggcccggcccagttcggcaaagaagccgggatcctccgccgcagccgcgagcgcctcctgtccaaaggactcgtaggcctccagcaacggttccagtctggagaggtcggtcacggacagggtggtctgatcctgggtgcccaccgcctcgcagccttggtaataggtgtcgcagatggcggcgcccagcgccgcaccgtccatatccgtattttctgccagcgcccccagccagccggaatagagccagccgttgcccggctccacctcttcggaggccaccaaatatttggcaaagccctggaaggtggacgccacatccaccgtggccatcaggcaggtgtcgaagcccaccagctccagcgccgggtgttcagcgtctgccggccatacggcgtcaaaggcctgatacatctcggcaaggtccagggaatccagcccgtgtagctcgtcaaaggccgcgccgctcaccgagccgccgccgtggttccagaaggtcaccgccaccttgtcggcggggtaattctcattggcaaaagcaaggaactcatagagggtctgggcgtcgcccatattggcggtatcctgctcctcgatgagctgcagcccctcgctgttgtagagccaccgctgaagtttttccggatccatctggtcgttctgccacacggcggcgccgccggtctggatgaccacattgacgttttcgggcagctgtacctccatcatctcggaaaggtcggtggtggcgaagccgccgttggtctcaagatcgctgccgcacagataccagtacaccgcccagcttccgtccccggcgtgaaaaacgggggcggcgtccggggtggacccatccgcagcttcgtccccgccgcaggcggcgagggaaaggcacatggccgacgccaagaggaatgccaataatttgttcttcataaccttctccttttcatatccccaaaagctgccgcttcttggccgtgaattcctcctccgtcagcacgcccgcatccagcagggccttgtacttctggatctcattcacagcatccgccggcgccgccggaccgctctgcgcggtctgcgctgcggcggaggaattgagatgtatttcacccgcattgggatccatcatgcgcatcagcttggaggccatcagatgcagctcctccgtctgctcccggtagcttttcagatagtcctccgcacgggggtagtccctgtcaaattccgggccggagaattcgtcctcgattttctgccaataggggtggtccagcatgatctcaatacggaatttctgcatcggcgcaggcccttcaaaacgggggcggtacaggtcgctggtacgttggcgctcccggcgctcctcgctgctttcatccaaacaattccgcaggtcttccatggcctcccggcgctcatactcctgcttgtgcatatggaactgcgcgatgatctgcgccataccgttcacccggtcgggaacgctgctggcgtggcagctcagcaccccgtcgccgctttcaaacagggtttcgccatcctctgaaatacggaaggacttcagatccttcccctcaaagacccagccgcggttctccttggcacggaggagaccgtgagcctcatccacatacagcgtgccgctccaaaagccgatatgaaattgataactgctttgaaactcactctgaaggcgcttgttgtccgcaaatgcggcgaggtactgcctgaagtcggagagggacatcctgtttaccgcaccgtccggcaggtcgatctggctgtcgcattccttacagatgggctgcccctcgattttggtcgccagcagacggggcgttgggctgccgcagatggggcacaattttttgttgttgctgaataatcccatagtacgctcctccccacatcagcaaatggcgacaggttccctgcgggcggcgctcttgagtacctgacacatccgttccaaatcgccgccaaagccgccaaagccgtaaatgtcatcaggactgttgaagtagatctcgatcttcagctccggccagtagggctccgtggtggtgagcacaaggcgaaaataatcgttgctgttcttatccttatccagtatttttgcaatgccagacagggcggaaagggtgctttccagtgccgttgcgccgggcgtatcggaatcatccactttctgattcagccggtacagctcataccgggtgatctgatcaaaggaaaacaccacgggattatccgaatcatccatatccgcatcgatgagatacaaaaaaccggcgccgggatccacgcccatcttcgtgccgcgggcatcgtactctgcctcccagtgcagcgcgttgtatttcagggcattctccctgcgatattccagatgttcctttataaattccggcgttgcgtccttcagcagctcctttgccatagaaacctgggcagagcaatccttgcacagagccttcttgccgccgatttttttgtgaaacagtcccttgacttctccgccgcataccgggcaggcttctttcttatgaaacagtcccatcatgttcctcctatcacattcagttatcttcagcggatcccgccgctgcctccgccggagaaaccgccgcctccgccaaaggacaccctgccgccgcccgatctgcggttcggtgctctgcgcagtttttcacggctgtacgcaccgtacatcacgccattgtaacagccggtataacggacataacggcgatattgatttaactggggaagctgatccggatatagctcctgaatctgtgcctccagcttgtctgcgatgcccagcatcagggcatataccatataatcctgccagatgaccgcttccttgacgccccgttcgtggatcaaagagaaatccaacaggaaatgcttcaggccgtatacctcgtccagctcctgctgtcccttttttgtcaggtccttgtcgtgatccagaacagcgtctttcaaacagctgctcctgatcagcgtctgcttgccgctgcgctcacaggactccataaagcgggacagggggacgtagttctgcccacagtagtgctccagctcgttaggatccaaaacgccgtccgctccggcagcagctttcagaatggtgtagagcgcgtcatcgtacatatttccgctctgaggcccatggctcaaacgcaaacggactggttccgcatcgttggaatcgtctgtgctttccatgcagccctggctgatcagccgcatcagataagcacccagcaaggcgtcctcttcacacaggccgctgcaaaggcccagctgataggtcacattcaaatcgccgccattgggcgcgtcacgaaagtagccgacccgctccattcgcttttttctcttggcttttcccacttttacgagcaatacaaccagcagaaggatgagcaaaaccagtgtgagaatgatcgcggcaaacagcaggagatcccctgccgtaaggggttcgtcatcccattccgcatcctcaccggctccatagtcgctgcccgcaagggcgcgctccttcaccgcttcaaagctgtcctccacgacgcgcacgggtgagaggacgcccttttccagagccaccataacggtcatgtgcgctccgctttccagcggcgcttcgctccacgcccggataacgccgtcctcaaactggatctgcccgtcaaagccaaaggcccagatgtcacagatctcgtccgtcagcggcgtgccgtcctggttgcggatggtcagcgtcacatcagtggggaaaaagttcatctcgtccacaaagcggtggttgaagccgtctgcgtcggagtagtttcccaccagatcatggagcacatattcaatggtatagcggttatccccgtattcgctgacgccccagcatagctccacgccctcgccggtctcaagaatcccgcagcggttcgccttctcctcaaaggaaacgtccacgtcccagtcctccacatagacataggggccgttttggtcggagacggaaaaatcggtgatggtcagatagccgctgtccctgcatccgagataaaactctgttccctcatcggcgtcggtcgtccaggtctggatgatgtgggccgcgccgtcgggccgcaaagccacatcgagctccatctccggcacacggctggccgccagagccggcgtgcagagcaaggcagcgcaaaggaaggccgcaatgatgaccgcaatcttctgtttcattggctcacttcatactgggcatatccgccttttcttccaccgcctccagatagtcccgctgacggaacccgaacatgccgcccagcagggaggtgggaaacatccgcagttcccggttcagcctggtcacgctgtcgttgtagatgaggcggctggtgcgcaccattttttcatagctgtccacggcatccatgcactttttataactctcgctggccttcagctcaggataccgctccgccaccatggagatgcggcccagggcctcggagatgagtccctcctgcttcagcacatcgtccggggtggatgtggccgtgatgacgctgcgccgggatttgatggtctcgatcagggtctgggactcgtgagcggcgtatccttttgccagatccagcagggcggtgagcgcatcgaaacgggaggagagctgcaccccaatctggctcatggcgttgttgacattctcgtccatggccaccagcctgcgctggacgccgatcccccagatcacgaaaattgcgatcagcccgccaattatgatgaacggcataaaaatagcctccttcaaaactcaaggcggatgcggactggcgcatccgcctcaagcagaatcaaaatgacatcatgtatcgttgtcttgaattatccttcgttctccagatattcctcaatgatgccgttgaactcattgcacgcctcaaccatctcgtcaagctgctcctgcgtcagttcggcatcgctctccagctgctcaccgtactgcgtgatcgcgtcggcaatcgaattcatgtagtcgatgtcttcttcactccagccgctcagatcttcattggtgatctccacaaacttgttgtaattttcggcaagttcgttgtaggcgtcgatggcgggctgcttatccgggccgctgccgccgcaggccgccagggagaggcacagcaccgctgccagcaaaatggtaagtagttttctcatgttcgtattcctcctgtatttcatacagccgtttggcttatctgtatcataagccccatgaacaaaaaaagggggcgcacggcctgaatcgtacgcagaatgtactgaatcgaccgcgcgcccaccttcaaagggacagccgcaggagaaatattccgttgttcgccgagaacgagcagacaccgccgtatttcttcacgatggcgcagatgctctgaacgcccagaccgtgaccgggccggttggagatgggaacgccgttttcaaaccggactggtccggcgcagggattggccacctgcaaaaagagcctgctgtcctgctcatagccccccaccgaaatgacggggggtgtttccgcagcgggcagattctgacaggcgtgaagggcgttttccaacgcgttggacagcagcacgcacagatcgctgtcggagatcaggagaaagggtgggagcgtcaccgccgcgttcagggaaatgccgtcccggctggcgcgctgcgcaaaggcggagaggatgagatttgccgtatcgttttcacagtaccattgtaccttctgtgcctcaatctccgcgcagatgccggagatataggcctgtgcccgctctgtctgcccctcttcgatacagcccgccagatattgcaggtggtgacgcaggtcatggcgataggcgctggcctgcttttgggactggcgcagcgcgtcgatctcccggaccgcttgggtcacctgcattcccaggccgttttgaagctgctggagccggttccgctgctcctcctcagccacataatacagaagaaatgccagatatgctccacagcagacaaagggcataaactccaccaccacaggtctgccgctggtgagaatgtctgtgtagacgacggttgcgtagtcaaacacatagtacaccgttgggatcacgccgaataccagcttcagtttgatggagtgatccgccagcctccggatggacggcgcggcaaaccgcagcagcagggcaagcagcggcagcgtgacgacaagctccaccacatcctgcatcacatggccgccggaggccagcgtcaccacaaacagcgcaagccagcgccggagctggcagcagaggtaggcggtcaggacggaaaccgccgaccaccatggcctttcggtgagtgaggacatgagcaggatcaggggcaggtggatgatcagcgggtagatcatccggagaaattccccatcccatgtggcatagatccagcccgacgcaagggggatcaccgccatgcagcaccagaacaccacccggttccggcgggagtccagcgcgccgcagaagctggcggccagaatgctcccgaacagactcaccgcaacatcgttcagcagggaaacaaccgtgctcataccatcacccgcctgttccggaaggcgtattccagatatgtgtccttgacctcattatacttcccccgtgggagcgggatctctgtcagacaggacatggtgaccgcccgagcggagatattccggacatattccagattgaccagataagagcggtggggccgcaggaagcaccggtatggctccagctgggcgctcaaatcgtccagacttccgatgctctccagcaccttgccggaggtcaggtggaaaaacagcgtccggtggatgacttcgcagtattccagctccttcagcccgattcgggcaacaccggttttgcaccgcaggacaatgctgtccagatgctctttttcacacgccgcaaggacggagtccatcagccggaaaaagctctccttccagatgggcttgagctggtaaaagtaggcccccaccgcataggactgtaccgcgaactccgccgaggaggtcagaaaaatgatcttgactgctttgtcaaacgctcggatctctgacgccgtgtcaatcccgttgatccccggcatcaggacatccaggaacagaatgtcaaacccggcgccgcgttccatcgagtggatcagttccagggggctgtgaaacatggcgcagtcgagctcttcgtcccgatccgcgcggtattgctccagcagcaaccggagctcacgcagtacggcgctgtcatcatcgcaaaatgccacctttgtcaccgtatctctccccccctttttgcagcactccggcaggacgcccccccaaaaaaagcggtctggtttttgaggaagctggtcttgcggagatggatatattcttacactgtcattataattcgcccctaaagggacgagtcaagagacttttttcataaaaacaggtggttattgtgaaaaagcatggggataacctgttcaaaatcggggaagtggcaaagatcctcggtgtgacccgcaaggcgatcctgctctatgaggatatggggctgctgaccccagcggtcaaggatgagaaaagcggctttcgctactatacggcggataatatgacacagatccgctctatcaaatctctgcaagctctcggcctctctctgaaagaggtagcggaatattattacgataccaagaatatggacaagcatctgcaccgtctgcttgaactgcgcgatatgctggatcgaaatattcaaatgctgcaggtgcgctccgccagacagggcgatctgaccgtccataaaaccgtcctcccccggcaggtgtgctttgtccgccgctattcctgcgccgacgtggccgaggccgcaaataagctgcgggacacctatattgccgctgcccgcaccggaaaaatgtctatggtcgggcggatgtttaccatgcggatgacgccggagccgggcatactggatctcatgtgctgcatccctgtggacagcgactttgatggtcctgagcggatggaattcgcggaagcgcccgccctgtgcatctattaccgcgggccctatgagggaacggcgacagcgatccgtgcactgatggagcatattcgggaaaagggtattgaaaccacagggccgttccgcgccgtctatctggaggggccgcccaaccggggcgaacgcagcggcgactacatcacgcaggtcgccgtgccggtcaaggatttgcagggcgcgtagccatgccgtcaggcccggatccgtgccaaagcgcctctgcccgtccacggcggggatcggctctgccggcgccccggctttcatttctacttgaaacgatggggatattcgcctataatgacagcgaataaaacatcctttggggtctcattgtccgcgatctggcgggatggaaggcctgcgcgttttcgtatatgacagataatacggatgagcagaaaacgatccgtagaaataaaggcggcggtcaaatgaaccagtatctttctctccgggaaacagcggaaaaatggggcgtgtcggaacggaggatcaatcaatactgcgcggaggggcgtattccgggcgcgcagaaaatcggaaatgcgtgggcagtgcccgctgacgcggaaaagcccaaagacccgcgccggacgcggcggcagacaaagcccgccgcaaaagcgacagccgcagacggatttgactgcacaaacctcatgccgctgatgaatacggcctttgtaccgggacattgccgggaagcggcagaagctatggcggcaggcccacggcgggatattgccatggcggagtatcac

SEQ ID NO: 4584 - DNA, 17604 bp, Unknown
  16S sequences of unknown bacteria
agtgagagaatatgaaaaaagttttgtgtaatctgttttgtatggctgtattataacccgtcaatatgattattttatgaaaaaaatatgacacgttcaaaaaaaatcaatgttcgttatatttttccgcgatcttttccgcgacgcgcagcccgtcggcggcggaactcgtaatcccgcccgaatatccgctgccttccccgcagggaaaaacgccttccaaagacacgctttccagattttcgctgcgcaagatccgtacgggggaagaaaatcgcgtttccgcgcccgtcaaaagcgcgtcgccgtcggcaaagccgcgcagccttttatccatatcacaaaccgccgctttcagcgattcgttcacatattgcggaaaaagcgcgttcaggtcggtataggtcacgcctgcggcatacgtaggcaagacttctcccgcgccgcggctcttttttcccgctatgaaatccgccagccgctgcacgggcgcggcgtacgtttctcctcccagacgaaaagctctttgttcgagttcccgctgaaaacgcacgccgtcgagcacgtctcccctgtcgtaatcgcagaaatcgatctgcaccaaaagcgcgctgttcgcattttgaccgtcgcgcgcgtaatcgctcatgccgttggtgacgacgccgcccttttcggatgacgcgggcatgacgtagccgcccggacacatacaaaacgtgaacgccgtgcgcgcgcccgcatgactgaccagtttataatcggcggcgggaagttttttgtagttttcgccgtactgcgaaaacccgatcttttcctgcaaatgttcgatcctcatccctacggcgaattggcgcggttccattttgacgcccctttctttgagcatcgaaaaagtatcgcggctgctgtgtccgattgcgagcaccagaacttccgcgggaagttcgaaaacatccccgtttttcagatcgcggcatttcacggctttgatgcggttgttttcggaatcggataccacgtcggtcaggagcgtatgaaacagcactttcccgccgttttccaacagatacgcgcgcatatttttgaccacgccgcgcagacggtcgctgccgatatgcggtttattgagatacaggatctcctcgggcgcgccgaaacgcacgaacgtttccagcacttctttgttgagcggactgttcgtctgcgtattgagtttcccgtcggaaaacgtgcccgcgcccccttccccgaactgcacgttgcaattctcgtcgagcatcttatttttaaaaaagttttcgttctgcgccgcacgttcgtccaccgtgccgccccgttccaatacgatcgggagaatgccgcgttcgacaagacgcaccgcgcagaacagccctgcgggtcccgtgcccgcgacgagcgcatattttggcggatgtttgacttttgaaagcggctgcggtcggatttcgggcttcgaggcgtacgcttcgaccgtatatagccaaaaaatattatttttgtcgcgcgcgtccaatgattttttcaaaattttgagatacgcgcacttgcatttgcattttttctcgacgcgcggacgaaggagcgtttccgattcgcccaatttcaattttatttgttcccgcatgaaaagcccctttccgcgatggcagccgcgacgcattccgccgaggaaaacgcccattgcagattataaccgccgcattcgccgtctacgttgagaatttctcccgtaaaatacaattcgggacaaagtctgctcatcaggcgttcgtccgtttcttccgtcggcacgccgccgcgcgtcacctgcgcatagtcgaaccccagcgtgcccgtcacggcgagcggaaactcacgaatcgatgcgacaagtgcgggcaccgcgccttttccgcagggcgcattgccgccgattccgcacgatttcaataggctgcgggcgatagaattgtttacgatcgcgcataataagtattctgcgggctgatcgggatattcggcgattttccgttcgagcgtttccgtgagcgcgcgttcgtcgatttcgggcagaaaattgatttgcagcaaatcgttttcgcccgacaaataggacgataacttgaagatcgcattgccgctgacgccgtaatcggtaaatatcacgtcgccgcgcacgcttttacgcaatttctgtttatgatacagggatacttcgcaatcggtccgtatgcccttcatgccgcggatcaggtcctgcggcgttttcatctgaacgagcgcgggcgagagcggcgcgatcgaatgtccgaacgctttcgccaacgcgtaggcgttcccgtcggtaccgaaatgtcttgcggcttttccgcccgcagcgagcacgagatgcgcacagcgataggtatccgattccgtacggacgaaaaattcctttccgttcctttctgcgccgatcgctttttccgacaacgctacggaaatttcttcgctgcgcgcgatctgcatgcgcaaaagatcagtgaccgaagaagcttgccgcgacaagggataaacccgcccttcctcatccgcaaaaaataaaccgcccagacggacgagatactcttgcagcgcgcgttcgtcgaacgcctctatgatcttttgtattttttcttgttccgtggtaaagtaatgctcggcgcccatcgcggcgttggtcacgtttccctgcccgttgcctgtcgccgaaagttttttacccagtcggtcgttgcgttcgaggatcaggatttttttgcagacgcgctcggcaagacggagcgcgcacatcatgcccgatgcgccgcccccgagaatcacagtatcataaaatttcataaaacacctatttttttctgttttattgtatattatttaaaaaacaatgtcaatcacatttgaaaaatttataaatacttgactttgtaccgaatttgtattaccattatattagaaaaataacgaaagggagtgaaaactgtggataaaatcatagaatatttcaagaacaaccccatcctcggcatcattttgctcgtcgtggtcgtcgtactcgtggctgtcatcatctgggcgatcgtagccgcctgcaaaaagagcggcaaaaagaaaaatgacgctgaacagccggataccgcagtcgaagaaacttccgaacccgcggacgaagaaccgcagcaggtgatcccctatgaagaaatgcccgtggagctgaacgaaaaagaagaagaaacggcggaaacgcccgttcccgaacccgccgtccaagcgcccgcggaaaccgaaccggagcccgagaagaaagaaatcgccgcggaagaacagcccgagaaagtacaggtaacggaagagaaaaaacaagcaccgaaaaagccgagaaagacacagagcaaagaggctctcgcaaaaatttattcggggaaatgggtcgtttccgtcagcggacagaacgacgacggtacgccctcttacagtttcgaactgcgcgcatccaacggcgaaaaactgctttccagcgtcgattataaatcggtgcagggcgcaaaaaacggcattaaaacctacaaatcgaacattgaaaaggataatttcaccattgcgcagaacaaaaaaggcgaattttatttccgtcttttgaacggttcgggccaccttttgagcacgggcgaacaataccagagcaaatcgagttgcgaaaacgccattgattcggtcaagcgctttgcgatgacggcagtcatcgttgtggaagaagaagagtaataaaagtaaaaaagaccgccgaaaatttcggcggtctttttttatatatcgaagttttccgaatggaagttgctgtaataccgtcccgtttcggcagtgaatttcagcacgcagtaatctgcgtcgcgccccccttcgggatagtacgtttcatcgcccgaatgccataagcgctctttcgcctcgtgggtttccaagacttttattcgccgacgctcttttccagtttttcgaaaaacgactgaaaataatcgccttcgaacagttcgataagccccctgtcgctgcacgtcgtgagcgcgttgtcgaaagggatcttagcgacgttttcgacgcctaattctttcgcaagcgcgtccgcgcggctcttcccgaaaatctcgatgacctttccgcagtcggggcatttgacgtaactcatgttttcgacaatgcccaaaacgggaatgttcatcttttccgccatattcaccgcctttttcacgatcatcgaaacgagttcctgcggggtcgtgacgaccacgataccgtcgagaggcaaagactgatagaccgacagcggcacgtcgcccgttcccgggggcatatccacgaacatatagtccacgtcgttccagatgacgtccgtccagaattgcaggacggtccccgcgataactgggccgcgccagatgacgggatcgcagtcgttgtccaatagtacgttcatggacatgatctccacgcccgtcttgctgatcacgggcaaaatgcccatttccgtacccgacgctttttccgatatgccgaacattttcggaatggaaggccccgtgatatccgcgtccataacggcggtgcgcagcccgttccgctgcgcggtaacagccaacagagccgtcgtgagcgatttacccacgccgcccttgccgctgactacgccgatcacccttttgatattgctcaattcatgcggctttttatgcatatcgcgttcggaacagttttccgaacaactgccgcactcgtgcgtacattcttctgacattcttttctccttataacaaatctttggggttgtactcaggttttttatagagttttccagatttctccgtgacttcctgctcaaagatttcctgccattcctgcgcggtgaaatcttcgatcgtgcaactcacgtgcgactcggaacagcccaattgttcgacgagcgtctttacgagcgcggcggaaagtttttctttttgctcgggcgtacgccctttgagcattttgattccgatatgcggcatcttttttctcctttcgattaagtttttttattcagcgcgtaatacaatccctttttcgccatcaattcctcgtgcgtgcccgattcggcgatccccttattggaaatatacaaaatacggtcggaattgcgtatggtggaaagcctgtgagcgacgataaaactggtgcgccccttcaacagcgcctccaatgcgcgctgaatgagtatctccatatccgaagaaatagaactcgtcgcctcgtccagaacgacgacggagggatttttcacgacgatcctcgcaaacctgatgagttgtttttcgcccgccgacagcccctcgcctctttcggcgagttcttcgaaatagccgttgggcaaacgctcgatgcaactgtcggcaaatatctgtttggcggcggcgatacactcctcgtcggtcgcgtcgggcctgccgtatcggatgttttccatgaccgttcccttaaagataaagggatcctgcatgagcacgccgacctcgcggcggagagatttcagtttgacgctgcgcacgtccacgccgtcgatgcgcacggccccttccctgacgtcgtaaaagcgcgtcagaaggttgatgacggtcgtcttgcccgcgccggtaggtccgacgagcgcgatgctctgccccggttccacgtgcagatcgaagtgttccagaatattgatgccctcttcgtaaccgaaagtgacatcgtcgaagtctatcttgcccgcgatgtttttcaactcgatctcgttgccctcgtcgttgatggcggacggcgtgtcgatcgtttcgaaaatacgttcgaggtttgcggaaacctgcgcgagattctgaataatggcggaaagttgcgtgagcggcgtagaaaacaggcccatataactgacaaaagcgaccgccgtgcccgtatcgacgccccacatgccgcggctcatcaaaaagaaggaaactccgtacagcatgatcgagccgtagtaccagaaaatttccacgatgggcgtattcaattcgttgatacggacgatcttgaaccaggtattgcacgcatcctgctggatatcgtggtaaacctgttcgttgtaaagactgcggttgtaatttttgatgatcttttcgcccatgatcgattcgacgatgtaggcggtgcggttggacgactgcgcgcggctcttgcggaaaagttttcggatcactttgcggacgagcatgatccctaccgtgagcggcacgatcgccgaatagacgacgagcgtcaagaacgggctctgcacgagcatgaacaccgtcaccacgatgattttgatgatattgagtataaaattcatcaggtagttggtgaaaaaatcggctagttcggtaatgtaatcggtcacgcgcacggaaatttttcccgcagggcggttatcaaaataatcgaacggcagcgtctgcaatttatagaagatatccttgcgtatctccgcgatgacgccgtgccccatgcgtcccatggagcgctgctgatagaaagtgataaatatttccacgagccccgcgacgacaaagccgctgagcacccagaaaaactttttataactggattcgggaatgacgaaattgatcagatacttcaaaagcagcggcgatacaagcgacgacgccaccgttatcagcatgagcaataaaaccaaaataaacagttttttgtgcggaaggacgtaaccgataaggcgccgaagattttttacgtcaattttttcctctttgacctcttcgtcctgaaaatacgtattgcgctgtgccataattatatcgcctctttgtccgattcggactgcgtcaccgccacgaggttatcgatatcgccctcggtcgtctgcattttatagatcgcggcaaatctgccgttcagcgccatcatctcttcaaaggttccgcgctcgatgatctctccgtcctgcaaatacaggatctcgtcgcagtccgcgaccgaagtcacgcggtgcgcggcgatgatcacggtcttgtcgggactcttttctttgatcccgctcattaccttgcgctcggtgagaacgtccagcgcgctggacgcatcgtccagaacgagcacgggcgcgtctttcaacagggcgcgcgcgatggacacgcgctgtttctgtccgcccgaaagcccaaggcccttttcgccgacaatggtcgaataaccctgcggcagtcccttgatgaacttatccgcctgcgcgagttgggcgacttttaaaatattggattttcccgtttcaggcgaataaaaagcgatgtttgcgtcaacggtattggaaaagagaaatacgtcctgaaacacgtaggcaaattcgtttcgtaaatcgtctaaatgatatttgcggatatccttgccgttgatactgatgcgcccctgcgtgggttcgtagatgcgtacgagcgattttaagagcacgctcttcccgctgcccgttccgcccatgataccgactttctttccgtagggaatgctgaggttgatatttttcagcagagattttccgtccgcggtaatggtgacgttctcgaattcgatattcggcttttcacgcaggctttccgcagggtcgggttcggcgacgcggctctccttttcgagaaattccatgatgcgcccgcccgataccagcccgtactgaaattggtacaggttattgttgagcgcggtgatatggtccatgatcttgacgacgaaagtcgaacaggcggtcatggcgccgatagatatccgtccctgaaaagccaggacgacgccgagcgcgattgccgaaatgtaggcgacctggcggataatattgaagagcatattgtatttggaggaagtatctacctgcgcgatataagcgtctttgatgccgttgttgcgcgcgtcgaacttgctctcctccacgtcctcgttggcaaaggcgcgcaccaggcggacgccgccgatattttcctgcacggtcaagttgagttcgccgttccgcttgcggatatcttcggaaatgcggcgcgccgctcgcatatagcgaacgagcgccaccacaagaagcggcgcgatgactgcgggaatgatcagaaaataaggattttgcagccacaaaaatatactcgttatgatcagtacgagtatgctgtcgctcaacgccaccgtgtagcgggagtacatttccttatagatgatgacgtcggaattgagcgttgtcaaaagttcgcccgtgttgtactgcgtgatcgtcgcgctgtccagatcaacgagttttttataactgatgtcgcgcagttccgattcaaattttaagcccctgtactggaacagcgtgtttttcaaatagagaatggcaagccttgcgactacgaaaataaccacaaagagcgcgatattgaaaaataactgccaggtttcaggggccccgaaatcaccgtttattaaaaaattaaaaacccccgcattgtttacggcgtcgggattgtaattgatgatgtaatccacgaacagagcaaacaagagcgggaaaaaagagtcgatcacgatcgcaacgccgcctaaaaatttgacgaacaaagacgcgggaacgtgctttttccaataccgcaacccgtaacgaaatgcgcccatattttttcctgtaaaaacataatattttcgtattattttataggaaaaaatttatttgtcaactgttttgcgaagaaagtcggaaaataattttgccctttatttttttatgcaaatcgggcgaaatcagttgccaaatcccgcgatttaaggtaaaatgattacgctgtgctaggtggggagtcagcggtgccctgtatctgcaatccgctacagcagaaccgaataccgcccccggattagcgcgtggaaggccgcgctccgtaagggatgttgatttcaaggtcttatgcaacggaccgccgtgaaccgtgtcaggatagggatatagcagcactaagcggatttgttcgtgtgccataaggtagctttgaaggagttacctgcggttttaacgcttcggcgcgttatttcaaaggcggttgcacagtttttttgcggaaaaagcccgacgatgtttcgtcgggctttctttttatttgaaaatcagttcttctgcggaacgggtacggaaataatcgtatttatagatcatttccaaaaattcctgttttttataatattcgctcgtgcggcgtaaaaactcgttcacaccgtcggataaacaatctctcatatctaccgcgtcggcatcctcgggggcagtgctcaaaatcgcgtccaaatcgtacacgatataatcgcccgcgctgtctgtaaacaaatatttttccagtccggaagcgtccatctcgacggcttcgccgtcgagccgtatcgatacggcgtcaccgttgaaacagatctgcccgtcgaacgagtaaagcgggtctgtttcggaggctctcggcagcgccttcacaaaaacgctgtcgccgtccgaatagatatttgcatcgaacattcccgactcgcggctgataaataccgattcggcgtctttgaaaacgctcacgccctgatataagttcaaattgaaatcgtagcccaaaagatcgagcagcgtgggaagaatatcgaatgaattgcagtacttagaaatttgtatgccgccgagattttcccccgcacagcgatgatctatgtcataataataatcgcctgtataggaagaatgcacgttttcgtccgtattcgtatatgtaagccccttgtacaagtcagatccgatattcagatccatgcaattcccggaccagataaagaacggaatattatataattccgtattccagtattcggtagtcgggatatctttgagcagatagttctgttgattgtaatagcagttgtgatcggcatagaatacgaacgccgtatcgtcgagttcccctttcgcctccagttgatgaataaggcggttgacgcctacgtcaagatccatgacgcccgcctgatatcgcttatagcgcaggtacgcgtccgtcagttttcccttttcgttggttttggaaacgttgagacgatgcgcctcgttcacgtacgtatgcgggaaatcatcgatgcgctcgtaatagcgttcttgtcccttgaccgagcaatttttcgaaaagtcctctttttctttttccgaaagtaccgtggtgtaatcgccgtactggatcagatcgttataactgccgtggctgatgagcgtcatcatcatggaaaaatagttttcatcgcccgcgtcttttttggaaaaatcgtctatgtactgggaaaggacttcgctgtccctgtccagatcgatgaactctttcttgtcgtaatagcccttcaacctttccatggtatccaaaaaatgcgcgtagtcgaatccgtacagatcggcaaacgtttcgttcctgccgtaataatcgccgtcgttcgcgtgaaaataattggtcgtataaccgccttcctgcaaaatattgggaagggaaaaatcaaaagaatgtccgatcagcccctgcggattgctgacggaggaagtgatcgtattttcgatgagcgcgggataactgcccagaatcgacatcgcctcggaatgattggtcttatcgcgcgcataatactgcgtcatcgaaacgccttgcgtggcgagcgcgtacagagtgggcgtatattcgccgttgatcgcgtaccattcgccagattcgatcacgacgagcacgacgttctgaccgttcaacgttcccgtgcgcagcgccccgttgccgccgtacggcgtcagatcgagcgcgtccagatcggaattgaaacgcccctccgcaagataatcgtccagcgcttttaaagccgtctcttcgtcctgttgttcggcgctctttttaccgtcgccgctgacgaaattcccgatatttttatagtagaacccgaacgtgccgaattttttatacgctttcgtcccgataaactgggtgtcgaaaagatatgtatcgtccttataaatatacaggttgtccgacgcctcggtcgtgataaaggaatcgagcgaaacaaaatacagcacggacgaaaagccagacgtaaggcaaaatacgctcaaaagaagaacgaccgcctgccatttgaaagaatgctttgcgccgatcttacgcatacgccacaaaagaaagccttccgccgccacgatcagcagcagccccgcgccgagaaagtaattgacgaagtcgttattgaaaacgccgcccacttccttcacgagattgagcatggtcagactgaacaccatattgctcatactgtaaagagcctcgttcacgaccgccaacacgacctgtatcaagagcataagacagatcagtatcgattgcgcgacaaaactgggcacgatgaaaatgaccgcgccgataaagagaagaatcgccagatcgagccaaaaatacgtcgggaaaacggcgaggccgatcacgttgaacgtaataaattcgatgatcagcgccgccacaatataactgccgatatacagtgactttttgataagcaaatctttcaacatacacctgttcagtaaatagtattctccgagcggttgccgccgaaaaattcgccgtaaatcgctttcagacatttttcgtaatcggcattgtcgatgccgacgatgatattgatctcgctggaaccctgatcgatcatcttcacgttgatatttgcgcgggaaagcgcgccgaacagcctggcggaagttcccacgctgtacgccatgccgtgccccaccgtcgccaccagcgccacgttgtgcagcacgcgcacgtaactgggagaaaccgcttctttgatctgctccacgagtttatcgagcacgccttctttcaaaaaactgctctcgatcacgagcgaaagcgtatcgatacccgacggcatatgttcgaaacagatgttgtcctcttccagaatggagagcaccttgcgggcaaagcccacctcgccgttcatcagagatttttcgagaaaaatgacggtaaaaccctttttccccgcaacgcccgtcacgatgttgccgctcgccacatattttttcgatggaagaatgagcgttccctcgtcctgcgggcggaaggtgtttttgatctgaatgggaatatccagtttccgcacgggaaaaatcgcctccgcgtgcagaacgttcgcgcccatgtacgagagttccctcaattctttataggatatgcgttcgatcttgacgggatgctcgacgatgcggggatcgcacgccagaaaaccgctcacgtccgtccagttttcgtaaaggtcggctttcatcgccgccgcgacgatggaaccgctgatatcgctgccgccgcgggaaaaagtcttgatattcccctccgcgtcggtaccgtagaatccgggaacgaccgcgcgtcccgctttcgtcagcgcgcggctgatcagcggataggatctcttttcgtcgaaacggcctttccgatcgaaaaacacgacgtcctgcgcgtcgataaagggaacgccgagcgccgccgctacgatgcgcgcgttgagatattctccgcgggatgcggtgaaatccacgctcttgcgtcggtcgatctcccgttccgtttcccgcaggatcgcctcgatgtccatatccagaccgagttcttcgacaatggcgtgaaaacgctttttgattttggcgaacgtttccgaacaatcgcccttttccacgctctctttataacaggcgtataacagatcggtaattttgatatcgtcggaaaaccgctttccgggcgccgaaacgacgacgaatctgcgcgaagggtcgccgttcacgatctctgtgacgcggcgtatattgttgccgtccgcgagtgaggtgccgccgaatttgcaaactgttaaactcatgattatttcgtaatctccttggcttctatatagtacctcttttcagcgctctcccccatggaaaacgttttgcggggcaaattgccgtactttacgacttgcgtaaacagcgcccctttatccattttcggcagaacgatgccgacgtaaccgacgtttttctccgtcaattcgcgcacggcgtcctccccgtgaatgtaatctgcttttccgccgttcgccttgatatacgcatcgatataggcgtccgtttccgccacggcgcgggcgatgtcgtcatcgaccttgagggcctgtcttttccctttgatatacaatgcgccgtcctgtccgcccgtaaatcggatacccttaacgaacttttccgcgtctacccccttgacgatacggttgatggactcgaaacggatgccctcgtcgtagacgttgaccgcctcgcagagcgcgaagcgcgcgggatgatcggcacgctccttcggcgacagatcctgtttgatcttatcccaatgtgccttagccgtggcgagcgaatggttgccgtcgcccacgacgaacaacagcccgtcctcattgcagagcgaatcgagtttttgcgcaactctttcgctgtcctgcacgaaatatcccttcgcgtgaccgcctttcatattcaaatcgaaatcgtacagcaaagggagatctttacgctgcgctttcaaatctttcaggacgatatcttcggggtcgttgtacagtaccattatatgcggcaactcgtaaagcgcgtcctcgcgtatcttcaggcggggcggtatgcgttcgacgatcgtcgcctcggaggcgcggatcgccgcggtgttccccttctcataggaatagcgttcgagatcgagcgcgagaacgatgccgaacctcgtcggcgaaaaatatgtagagcgctccacgagcacaaagcccgcgggcaattttttgaacacgttctccgcacggtatttccgcatggaggcaaagactgccgcgcatcttttatcacagtcgctttccagatacagttcgggtaggatcagacggagcgacgatggcttttcgccgatcgaagcgtccagttcttcccaatatttttcatccgaggtatgctggtcgcaggcgatgaccgcccacgcggtcatgtcttccacatcaggcaataagatttcgggtattttaatacagctttcgtacatttgaatccgatactccgtcagaaattgatcacgatgaacacaaagacagcgagcgcgatcgcaagcaatttgattggcacgttatcaataaaaattccggcgatctttctccaaaaactcttttctctcataattttttcctcccgtccgcgctcagatctttccagtaataatcgttgagcgttttcctgagcagatcgtaatctgcatagcgcgaaatttttccgcgctgggctatggtgatgatccccgtttcctcggacacgataagcgcgatcacgttggaagtttcggtaatgccgatccccgcgcggtggcgcgtgcccagttctttgggaatgttgacgttctgcgtcagcggcaaaaagcagcctgccgcctgtactttataattgttgatgaccatggcgccgtcatgcagaggtgctttggggaaaaatatcccctcgatgagttgcgtggaaatattggcgtccagcgtgacgccgctatccaacacctgcctgggcagattatcgttggataaaatgatcagcgcgccgatgttgtctttggacatattctgcaacgccttgatgatatcaccgatatagcgctccacctcgtccttcgaagcggtcgtctgatgcttggcaagttccgtataattgacgaacgtattcatgcttaggatatcgcgcttgacttccacgttaaaagtcattaagatccaccccaccagaacgagaggcacgatgaaataaatctgattgttaatgttttccgaaaagagaaatacggtgcccgtcgccaacaccaaaatcgaaatgatggcgatgacgtggcgtacgttgctcatcttcaagatcctgaaaacgtaataaaacaccaacgcgaacaaaaagatctccaacgcgtcgacgatattgaaatccgcgaataccgcggttattttttgcaaaaattcctgcatcgccctgtctccgtaaacctggttttacacatatctattttacatgaatttgtgaaaaaaagaaagcaaattgcacaacttgccgcgcaatttctgtcatgcgccgaaaaaaatcgccgcattgacgcaaagaagcgcgcctgtttgagaaattttaccgtttttcacgtcgttaatggcattaaacacgttcaaataacaatctttgacgcgctgtttgctcatcatcattgcctgctggcgctgttttttcacgaaatattctttctgccccaacagattggcggtgtccgcgtcgctgcgccccatggcgacgatctcgaacagcgtacggaaataattgcagacgccgttcaaaatattcatctcgtccacgcccttggatatgagttcgttcatgacggacaaataggccgtgtaatttttgcgcgcgatggcgcccgtcagttcgtacattttgtaatccgtgtcgcgatacacgacgtcgtctacgacctgcgcagtgatcacgccgccctgcaaggcatacgctttgagtttttccgtttcgcccgccacgcgcgacatatccgaaaggcaatagcgcgcgatgcgttcgcagcattcggcatcgaccgaaatacccgccctcttgaattgcgtaaagatccaccgcattaccgtttcgtcgtccgctttggagcagtctacgtgcgtcacggttttgatctttttgagatccatgactttcccttttggcgcgcgggaattcatgatcaaaagaatggtgctttcctgcgggttttcgaaataactctttaaatacgattcgtattctttttccgttgggtaaaaatcgacggctttgaccagacgcttttcgcttaaaaagggaaaactttccgccccgcgaacgagcgatatcatctcgctccctttgagattttctccgttgaacgaggtgtaattgagcgaaggttcgctcagatagcgctctttgagcatatcttcgccccgctctttaaaatattcttcttctccgtcgaaaagataaatgggcgaaacgccctcttccagactttttttgaacattacgaacttcatcaaacacctcgccttttcacaaaaattataccatctttcgcgcggatttgcaagtctcccgtgtgcctgacgctgattttgtcggaagcactttcaaaacaaatcttttccttcgcgcgaacgccgtccagcccgtcttcctttgcggaaaccgccacgtcgtattcgcccgatacggccgccgcgttcttaccggcaaaaagatatcgcgcgccgccgacttccgcaaagagcgtgttttcgtcgataaaacgcatacgcgccgttcccagagaaaactcgccctgcggattttttacttcgagtgaatgaaaactttgctgataatcgccgcgttccgcggcgtacaaagtttttgcggggatttccgcctgcatgacgggaacggcggcgttgatttccttttcgctgccgagcacgatgagcccgtccgcccctttgaggcgatagcgaagggaaaaagactgcgcggacgctgcggaaggctttccgaagcagacgagataatcgccgtcggaacggatatagacaaaacttgcattgtaatcgccgctgagaaagaccgcgttccccgtttcaaacgcaccgtttcccgcagcgacaccgcatatcaatacggcggacaaaagcagacagacggccgctttcggtgcggcgcgcaaattgatcttatcggacatgaccgccagaacgaagtaccataacgcgatatacccgccgaacgaaaagccgctgatgagaagaattttcatatcgagcgccgataagggaaagacggcgacgctcacgaggagttcggggatatataagagcgctcctgcggcggcgggaatgacgcacgcaagcagcgaaaaggcgaagagaaacgcgtatatggcgctgatgaccggtataaacagtagattcgtgaccagactgagcgcggacacgtacccgaaacaatcgagtaaaagcggaaaggtcgatatctgcgcggccaggcatatgcccgcggatgaggcaagttttcgaggacacctgattttttgaaacgcgcgggtaaaagtgccgccgagcacaatgatccctcccgcggcggctatggaaagcaaaaagccgacgccgaaaagatatacgggattgatgatcagcacggcgagcgccgccagcgaaaccgaattgagcgcgtcgtatttcaatcccgccgcattagagaacatgagtaccgtgcacatgacgagcgcgcgtaccgaagaaggcgaaaaacggcagacgccgacgtagaacaatagaggcgcgaatatcaacgcgcaccgcaaaagtttgggcatgcgaatacgtttcaacagaaaagacaaaatcgcatagatgactccgatatgcaatcccgacacggcg

SEQ ID NO: 4585 - DNA, 2280 bp, Unknown
  16S sequences of unknown bacteria
ctcggttgaggcggtgaacgaactctgctttgttcagaaaaagctgacgacaagcgaatttctcggaatcatcgcgaatgatttcgagggcaatgagccgctcaggcagtacataatcaaccgtcttccgcactacggaaacgacgacgacaatatcgaccagaccgcgaaaaagctcgcttcgatgatacatgaggtctcatacaaaaagctccccggaaacaagttcctaacccccggtacgttctcgtatgtaagtcacgcgtcgcgcggtgcggatatgggcgcgacctttgacggacggaagaaaggcaaagcctattccgatggctgctgcccggttcaggggcgcgacacgaacggtccgaccgcgatgataaactcgctcaccggatgggatcaatcagattttctcgccgggatggtcgttaacgtcaagtttgcaaagagtacattcgacgagaacaagcgtcatctgctcgtcacgctgatagagaccttcatgaggcgcggaggtatcgaaatgcagataaactcggtagaccgcaagacgcttgaagacgcgagaatccacccggaggatcaccgcgatctgctcgtcagaatcggcggttacagcgattatttcgtcagactcacaccgaccttgcagcaggaagtcatcgagaggaccgaatactgatgatcggaagaatcttcaatatccaacgcttttcgctcgacgacggggatgggatacgaacctgcgtgtttctgaaaggctgtccgctccggtgcgcgtggtgtcacaacgctgaatcgctgtcgttcccgaaggaactgctctacagtgggaaaaactgcgtttactgccgcgcgtgcgcgagcgtatgtgaaaattcatgccatagtttttcggacagacacgcaataaagcgcgaaagctgcgtcgcctgcggaaaatgcgccgaggtctgtccgaccggcgcgctgaagctgatcggtgaggatataacgccggaagaagtaattcagcgggtcatgcgtgacagggattactttaccggaaacggcggaatcacgctcaccggaggcgagcctatggcgcaggcggatttctgtattgctgtcgcaaagctcgcgaaagacgcggggatttcggtcatggtcgaaacgagcggattctgcgacaccaaaaagctcatcggaataatgccttatgttgacagattcctctttgactgcaaggcgtcggagaaagatcacaaacggctcaccggcgtcgatgacacgctgatcatgaaaaatctctccgaaatctgcgaaagaggcgcggatgtgtcactccgctgtccggttattccctgcgcaaacctgtcggaggaatttcttcagaagattgtcgcgctcacggggaaatatgacaggataagctcggtcacgcttctgccataccataagaccgggctcgataaatccgctctgctcggaaaatccgcgcaggatgagttcgaagtccctgaaaaagagcttatggagaagatcggcggttggttagccgagagaataaatcaaaagataattataaaatgaaagaggtaatgatatggacaagcgcatacccacaacagttctctgcgtcgcgatgcttgcggcatatgggtgcggtgggcaggaaaacgtcccggagaggacgagcgcgcccgaaacaagcggcgaagtgacgacagaacaggtatactcccgtgagaatatgcccgactctcttccggatgatctgaatttcggcggcgaaaaatttacgattcactgctttgaccagaacgcgatggagtggatcgccgagggcgagaacggtgacataatcaacgactcgatctaccgccgcaaccgcgcggtggaggacagactcggcgtaaatctcgatttctatcatgccggcgcactgaccgattacagctctgtcacgatgaacgcgctcagatcgagcattctcgcagggagcggtgagttcgacctcattgccggatacgccgcgttcatcacgcgcggaatgggcggatatctgacgaatctttatgacgttaagtatctcgattttgacaagccgtggtggatttcaaacatggctgatgaaatgaccgtgaacaaccggatgtattatatgaccggagacatcggactgacttttctgaggagctttgacgcctgctttttcaattcgcagatagcggaggattataagctgggcgatctctttgacatttataatgaaggaaaatggacgatagacgagatgag

SEQ ID NO: 4586 - DNA, 5229 bp, Unknown
  16S sequences of unknown bacteria
tggaaaccgacgaacattatattttaagcgataagcaatatctaaacggcgatactgtcaagaacaaaattatacggggcagtattgaggggcttaaaacagatccgaacggcagagttttaatgggtgcggttatagggctgttttacccgtttgaaaccgagttttctttagataccgcaatagaaacttttgagaccgacgaagcgggcagatttttatttgaaaatgtgccgtacggcgagtggatcatccgcgagcttaaagccccggacggatatattttatccgatgaaaattataccgtgacggtaaaggaaagcggcgaaacggtaaagcttaatattaaaaacagcaaagtaccggagccgccgtcagctcccgaaagccccaaaacgggagatacggcaaatcttttaataccgtcagccgcactgtttacagcgcttgcagtaattatatttttaagtaaaaaagagaggttttttaaatgaataataacgatttatctttaatcaatttatccgagatacgctttttaacaggagatacaggagaacgggaaaacgccgacgctatgatgcaggagcgcgggcttttaaccgacaagggcaacccgtccgtttcaggtatagcggagcaaaacgaacattatacgccgctgcttttaaacaggctgtcatataagcttcaattccgtgaaaacagctttgaatgtatacggaatacatacttaaaaatgtactccgaaaaggattacacaggaatgtttttgttcaccgttttaatgtacgggcttatagggtggcggacgccgcttaatttaaacctaatgtcatcccgcaaagaaatgcttaaaatctttttcggggaatttgtacggacgcttgaagactttaaaccgaaacggagcgcaggatatggggaaaaagaagaataggcttttaggttttctgtgctttgtcgccgttctaattccgcttttctcgcttaatgttttcgccgcgggtgaggatattttcactttgggagataagataatccgagatgtatacaaccatattgccggaatatctacggtattagcggcgcttatgtcggcaatagccgtaataacggtaaagctcggcggcacacaacaaaagtctgacgccggttgggcgtggcttaaaagaatctgggcttcgtgggcggttattaacggaataggcgcgtttatagcctacatacaacccctattcgcaggctacaaccgactgccttgaggttttttaagctatgataaacctcatattaaaagaccttgtgttgtggcttttcgggctgttccttgatttaatgaattattgcgccgacgcacttttggggcttatgaacacggatctatcgtactttgaaagtaatgtgccgattatagtaaagctgtacggcgtattcgtcgcaataggctggggatttttaataggcaactgtgcctttcagtgcctgaaagctatgtttgcaggactcggttttgaaaccgaatcacccgctatactgcttgtgcgcacttttctgttcggttttctgcttattatgtccaaacaggtctgcgaaatagggctgtcagtcggtaaaaccttaatggagctgatcggtttgcccgaaaaggcaagcataacctttcccgatgacagtatgttccccgaccttacaagctcttggcttttaattgttattattggggttttgataggggcgcagctgattaaattattttttgagataggcgaacgttatgttgttgtagcaatattaactcttttcagcccggttgcttttgcaatgggcggcagccgctcaacaaaggatatttgctcgggctttgtgcgtacctatgcctcaatgatactgctgcttgtttcaaatgtattatttttaaagcttatatattccgcgttatcctcaatgccggacggcgtgatgatactcccctggacggtgcttatagtgggtattgcgcgtgtggcgcgtaaggcagataatctgcttgcgaaaatagggcttaacccgtcctttacgggtgatccgttaggaaacggaatgggcaaggcggttgcatttatggcggcaagaagcattttaagctcggcaacacattctgctaataagcatagtaatacggcaggaaaaaacaggtctgaatttaaggctaacaatacggggaatacgcataatgcaggcagcagaagcacggcgcaaaacagcagcagagcgaatatgggattcaacggcggcagtgtaaataattcaagtaacgcagggtttaacagctctgtccgcaacagctcgtcggtgaattcggcagacttcgggaaagcaaccgttacaggcacaaattcaaaccgtttcggggcaagcaagacaccgggacagaaaggagacgcgagggttgataataaaaacacggcaggcggcagaaatgcggcgaatactgcccgaaatacggcggtcagcggcggaaagaagaataatacgggcgctcagaaatacagcggtaaatacacgggtaaccaaaaattcggcacgcaaaaaagaggtaaaaatacagcatggaagccggataagagctttagtcataatcctgtcggaccacggttcggacagacagataccccgccggagacgaagccggaaaaggcggtagaaaatgagccgaagcagtaattttttagtatccgccttgcagaacatgcaggcattaagaaagatattgcaggcgtttttaaggggcggctggaaagcggcggcacttgaagccgtaaaacattattggccgtatattttaggcgctgcagtagctttaattctgctcccgacagtaataatggcgtctctgccgtcggttatgcagggcaaagtgccggaaacagtaacggacgaggatattacggatatgtatattaaccgaatggatgaaatactctgcgattcggaggtagggtctgctaatgagataagggttgtcggtcagccgcttacatacaacgagttatatgcagtaagccttgcgctgaccggcaacaatacagaaaaaataacgagggaatttctgcttgggtgcgtaaacgattcgcttacctatacagtagagcgggagggaaataatacaggaataacaaccgccgttattcactatctgaatttagaggagttttcaagacttaaaggaatttcggacgcggatattgagtggatagggcttgtgtttaaagacttagaagacaataaaaaatcctcaccgggcggtgaggaatgaggtcaaataggtttactttcaacatagcaatattccgggcttatatctaccttgttggtccagaccttttcactgtcgatatccgggtcaatatcccagcataaggcgtttgcgtcatctatatatacgcgcctgaaattgcttatgtcattgaagctttcaaaaacgccgccttgcttaagggtgggtttcatatccagcctgcggcgttcgccgttatcaaattcgagcgtgaccgaaaaatcatcgtttgccgtagcctttacaatgctctttctgccgtttgcaaaatactccgcatacggcagagcgaagcctttttcaaggtaatattctactgtacgcatagcttaaatctccttttaattatcttaacggatctatcgggaaggtttcctgcttgttcatagcaagctcccaattttccattagctctgtttggtgaaacgcaccccagcccaaaagcatttgaagctgctttttcggcattgtgcctgcgagcacttccatatcgttaatggaaacaagcacctcatcactgccgtatttcgcgtgaaaatgcggcggcatatggtcgttgtagttgatataaatttttatgccgcggaacattgaaatagtgggcatttgtatcagctccgtttttgtttattttctcgctctttgcgaatttctttaaccatttcgacaatatcatcgtcgtttgtgattccgaggtcttcggcaacccctcgaaaaccgttttgggcatttttaagggcggtaatatccttataatatgacttattcatatgtttaccacctttcattttcagtatatcacaaacgaaaaaaatcttcaaggaggaaatttaatggaagaaataaccgtagtaatacccgtgaattttaccgacgcagggcggctgttcgggctttttgaaatacgcaacgctgtcgaggcagtgcttatctgcgtgcctttggcagcgcttttaatgcgcatattgccgctcggtcttttatggcggataggaattataagcgccgttaccgttattacaggcgggttcgcgctaataggtatcggggatatgagccttttggagtttttaaagcagtatatccgctttaaacggcaggcgaaaattttaacatataaaggggtgtaaaaaatgaatcttaaaaatattctgtttgggaacggggataaaaatgcagagcatggcacggaaaggttagtacctgtaaaggaaatatacggcggagtgattgcgcttaaaaacggtaaattcgtgaccgtattagaggtgctgccgctgaatttctacttaaaatccgagcttgagcagaagaacatcatatccggctttgcggcatttcttaaaacagcgcctgatgagctgcaaataattgtagaaacccgaccggcggatatatctgcattttgcgaaaggctggaaggctattataattctgagaaaaacgcaaattgccgccaaatgatattcgaggacgcgcagctggtaaactttattgccaaaaccgaaggcttatcccgccgcttttatatagtcttaccatacaccggacaggctcacgaaatttcagaggttgccgccgagataggcgaaaccgcattgaccgcaagacaatatcttgaagcctgcgggcttgaaaccgtaaggcatagcgatgaagatgaatttttaataaaccttttaagaaattatttcagaccgttttcggcatcatcggaaattgcaagtacagatttgccggaagccttaacgcccgacagcaccgactgtaccggcagcggatatatctgtattgagggggaataccgctcgtacctgtatatttcgggcggaggttatcccacaaccgtcgggcttgcctggggcgcgccgtttgttgaggcgggagacgggataaatatctcatttgtt

SEQ ID NO: 4587 - DNA, 4085 bp, Unknown
  16S sequences of unknown bacteria
gtcgagagtccatttcccgtcgatgacgtcctgatacggcagcgccatgtcgtagtcgtcgaacttctgcttgttcaggtagagcacataagcgcttttcagagcgtcaagtccgatcacgtctccgacgaggtacagctgtccctctagagtcagctcgtttatcatctgctctgaccaccacggctttgagaaattcaggtgatcaaggtcatagaggttcatgaagcagccgtcgagagagatgttcggtccgccgagagtgtgattcattgttatgtcgaactcgtcctcaccggacatgacggcggtctgtatgtactgtgtgtggtcgcgccacgctccggtgccgtccgactgctcggttatcttgcagttgaagcgctcctcaatccggcggttacggtcgaagattgcgtcgctgacgacgtccccggtcgcttcgtccggcgcgtagagaggtgtcgacggtacggcggagaggtagtttgacaggatgcggaattcatagcctttgagatcagtgtccgggagcccgtcgtccgggagtccgcgggagtcgtcgccggagacagccgtcgtgtcggtaatatcgggagtactcgtgtcggggtcggactgagaagacgcgtcgccgcaggagactacggacgatgccaggatggcggacagaatgataagggatacgcgttgtttcaggtcgtgtcgcatggttattgcagttcctttcgttatatgtcttgtcggtacttttattataacccacggcggaagatttgtaaagaaaaaagagataaacttatggacaattcgttccctttgtggtataattgagatgaaagggggaatgaaaccatgaagctgtatatgcacgacagacggacgccgctgctgacgcatggacacaacggagggtttatcgaacattatcactacgcgctcgagttcttctacatgattcacggagaggcggaggtgcgctccgaggggaacagctacagactgacggacggcggaatatatgtcgcttttccttttgtcggacatgagtatatagtgaacacggagaacgagtcgatggtcgggatattctacccgtcggacataccggaatactcggcgttcatcatgacgcacaagccggtcagccctgttgtcgatatgagcgagcttccggaaagagccggggatattctgctgcatctcgagagagtcatgaacggcgggaaaaggtgcgacgacacggtgaggcgctgtctgcttacctcgatagtcggtgagatgtccggagcgatggattttgtcgggcgctcaaagagcgggagcggcgcggaacggctcgtcgcgtactgcatggagaactattcggacccggacatgagcgttgaggcggcggcgagggcgctcgggtttaaccggtgctatatatcgaggctgctttcctcctgcttcgggacggggttcaacgagtttgtgaactctcttcgggtggataaggcgagagcaatggcggcgggaggagacacacagatacaggatatagcctttgagtgcggtttccgttcacagcgcagcttcaaccgggtcttccgtgagttcaccggtatgacgccgaccgggttccgcgcgaaatggtacggggttgacaaaagtctgatcgacaggaccgaatgaaaaatacaggctgacgttgtactgccgtcagcctgtcgttgtcatgtgtttatttcagtgtctcgatcagtgattccatagtctctttataaagtgtctcgttcttcgcccagagggacgatatgtccttgttttccccgacagccattctcatcatcatcgacggggctttctggtctccgaagttgaatgagtacatttccgtaaagtcatattcgatgttgttgaagattatgtcgagcattgcctcggagtcgctgtcgcgggtagcctttcccttgagcgcgcgctcatagtattcggggagtatgtccttccagccgtagtacgcgagagcctcgattatgcagcctacaagagcctcgtcagacgttatcggagctacgaaagctgtagagtttcctatcgcgttgtaggttatatacctttcctgcgcctcatcatacttcgggtacggaagaattccgaagtcgtccgacatatctctcagactatgagcgccaccgagggctgacgggtagaagaacgcctctccgtttccgaaggtcacaaggtcgccgttctggtctccttttgttctgacgacgcctgatccgttcatgaactcgctgatcttcttttccgcgtcgatgtatctttcagtgagtccgatgagcaccggtgtgccgttcttgtcgcgctcggtgatttttatgtcgcacgagtggatgaacgcgtcgtagcacatccacttgtcggtgatgtaaccgtaaatgtcgccgtccttgattttggtgtcgccgtcgaggtcgcgcgagccggttatcgccagcgagaacattttgtcaatcgtccatgtgccgtcgtcgaccatgccgtagagatctcccgcgccgatatcctccgctatctgcttgttgaagaacattgcgtaggtcgtgtcgtaatatgaggggtcaaggttgccgaagcagacattcgtcctgccgccgatgtttgcagcgtcgatgatgtttgcgggccaccacggcttcgagaagtctatgtacgggttcgcctgaagattccggaagctgtcgttcagagcgtcgctcgtgagtctgtagccatagcctccggccagctgataggcgttgtcgcccgcgagtatgctggagttcagggtgttcagccatgaaccgtagtcagctccggcgccttttctcgagtcataggtgaatgtcacgccgaacatatcctgcacttttatgttgcgcgcgtatacagcgtcattgatcgtgtcgccggactcttcctccgccgcgaagtggcagatctcggtccagagcaggaagttcacgttctgtccgtcgaatttcttgtcgggcttcacgtattcgtcaggagcgccggtcgatgagtcaggatccgttatgtccggggcgttcgtgctgtcagtcgtgacgtcggactgtgtgtcgccgcacgcgaagagatttccggcaagcatcagcgccgacagaagcagggatatagttcttatctttttcattgtattccgacctttcagtttatttataagaacagtatacaccatctgacctgtcaataaaagaaaaataatataaaatactggacaaattgtgcgatgtatgatataatggatactgatgaaaaatcagaacggaggcggaaaacatgaagatgttcgtgaaggatatacgtgtcccgtttgtcagccggggcagcaacgggtcttacggggaacactatcattatgaattcgagtactggcacatgatagacggcagggctgaggtcagagtgggcggaaagtcatacacgctctcttccgggcaggtattcatcgcctttccgtttgtcgagcacgagtatgtatgcgagggagagaatctgtcgacggtcgggatatttccaccgtccgacatacacgagttcaccgacattctgctcagatacagaccggtgaatcccgtgatcagcgtttcagagatgtttcccggtttcaacgagtcgcttgacagattcttcgcgtatttttccggaggcggagctaacagacgggtcgtttcgtgtatgctcggcgcgcttatcggggagatgctttccgcgactcagtttgagagccggggaggcgcctcgccggacgtgtttgaaaagctcatagattattgccttgagaatttctgcgatccggagctgacgcttgagcgcacggcgtcgacactcgggtacagccggtgttatctttcacacgtgatgagcgaatctgtcgggataggcttcacgaagtttctgaattcactgagagttgataaatcccgcaaaatacttctgaacgcggaaataccgataacgactgtcgcgctggagtgcgggttcggatcgataagaaccttcaatcgtgtgtttgccggtttaaccggcgtgac

SEQ ID NO: 4588 - DNA, 6579 bp, Unknown
  16S sequences of unknown bacteria
gggtagcgacatagttggccagctgcagcggtgtataaagctggttggactgcccgaacgccgcccagggggcctggttctgcccctccgggttttccggcagcgtgccggcataatcgccgatttcgatgccggttttttcgcccaggccaaaagcggtcaggtattcccgcagcttctccatgcccaggcggtagcccatttcgccgatgaagtagttgcaggaattggtgatggcctgtgtgatgttctgtaaaccgtgtcctgtgcgtttccagcagtaaaaatagcttttgctgtcgccgggatacgtccatttaccggtatcccggattttctcggtggtggtggtaacgccctcttccagcgcagcaatagcggtcaggggcttgagcgtggagccgggaggatagagtcccatggtggcccggttcagcagcggagaggagggatcctggctcagctccgtatagtcctggcggaaggtagacaggtcataggtggggtaggaagccatggctaaaatttcgccggtaccgatctgctcgaccacggcggcggcgccgcgggcaatgccatcttccgcggtcatgcggtctacacgttcggccagcagggcctccacctgttcctggaattccaggtcgatggtcagttccaccgtatcgccgggttccggctccacggtgtacagttcgctggtgactttgccggaatcattggtgttggaaatgcgcacgccgttggtgccgtggagatattcttcaaaagcagcttccacgccggcggcgcccacggtggcgttgagggaatagcccttgtccttcagttcgtcatattgctctttgctgatggcgctgacatagcccagcagatgggccgctgcggtggtttcatattggcgggcggaggacaggccgatatcagcgcccagataatccccgtttttgatcagggtaatcagattaatgtccacgttttcagccaggatataggctgaagtggcgtattccctgcgcagtgccagttcccagcgcaccgcggcgatcttgcgagcgtcggcgtcggaaaccgtttcatcgatgtcaaagctgcggcgcatggcctccagcagctgcggagcggtcaggttggcagggtccagagcaggatcctccagaaatgggtcggcttccaccgtctttttgggattgtccgcggctgcggccagttcattgcggtgtttttcgatttccttttccagccagggctgcagggtcttttcgagataccgcttgaagttggattccgcggtgctgctgcggtagggcgtgtaggtgaaaggtgcgtcggcgctcagggggacgttatcggtgtaagctacgttgttttcaatgcacagattcaccaggcgcagaatcgcctcattggtgtcggcgtcgtcgggcaggagggaggcgtcaaaagtcagcgtatacgtctgctgattgcctacgatcagattgccgttgcggtcggtaatgttgccgcgggcggcctccacggtagtggtgcgcacgatctgggacacagactggctgcggtattctgcaccgtggacaatctggagattgaacattacggtaaaatagcaggcgagcacggcgaagatgagcagtaccaataccacaatacggtgtttgggcagtttttgcgattcgggacgatccatggttctcctttcattcgaagcggaagcgcttgtgcagggcgttgtagaggaaaaaaatcggaatgacgaatacaatggaaacggcgatctcccgcccggccagaggaagggcggcggagagcgccgcaccgtgcagggctgtcagatacaggatctgaatcaggtcgatcaccgcaaaggcaatcagggcgtaaacaatgctgccgaacacattgcgcatgacccagtatttggcaataatggcgacaagcagagcgatgcagaaaaaggagaaagtgtatactccggaaaaaacgccgtggccggagaggtcgcacaaaatgccagcggcggtgccaaacagggtgccctcggtcggcccttccagggcagccaccacggccaccagcataggcgctaaaaagggcgaagcccccatgggggaaaggacaatgggatccagaaagagctgctgggcagcaaagagcagcaccataaccagggcatagattccccacttagtcagcagtttttttttggtcagcatggcgttccctccgctcatcagtccacaatggtgaagtcggtgatgacgaacacctcggtcagctcgtcgaagtccaccgccgggcgcagcagggcatagtccatggcgccggagtcgtcggtgatcacttcctccacttcaccgatgaccaggttggagggatagtagccgcccagacccgaggtaacgaccagatcgccgttgagcagcgcttcttctgaggaaatgtagttcagctgcagcaggctgtccgccatcaaattgaagctgcccgatgcgatggctgcttcgccggagcggaacacaatggcgcccatttcaaagtcggtgtcgatggtggtgagtacagtggcccagttggtgcccacttgatcgacgacgcccaccagatagccctgggcgtcaatcacgcaatccttgggagaaatccccatggaagatcccttattcagcgtcagagtgcgggtccagttgctgctggtatggtccaccaccatagcggattcatactggaattcccgctgctggggccgcaggttcagcagggagcgcagccgttcgttttcggcgctgtcggcctgggcctggcggttttcctcggccagcctggcgttttcctccttcaggcgcgctacttcttctttcagtgcgtcgtagtcctcagaaaaacggatgcggtcgtccacccagttggtcacggcgctgatgccggagcgaaacggggcagtgaccacgcccagggcgttttgaatcggcgttgccacgccggtgccgaatgcggacagcgccgccatggtcactgtgacgataacggctaccagcaggatccagataccgtgctttgcgaaaaattctttcatagagcgtacctctcgtttggagtgggaaatgaagcgggagatggggcgcggtcggagagacctgcgccttacaggacgggaacgtggaatttccggagcatacaagacaggcggcggatggggaggcccatcacattgaaaaagtcgccctcgatgccctcgatcagcagtgcgccgtagccttgggcgccgtatgcaccggccttgtccatgggttcgccggtgcggatgtatgcacggatcgtgtcctcatccagcggggcaaaacgtacccgggtgctttcggcttcggtcagcatgcggttgccctgcatcacggtcacgccggtgcacacagtgtgctcccggccggagagggaggagagcatttcaaaagcctcttcctcactttggggcttgcccagcttccgattgtccagaaacaccatggtgtcggcggtgatgacgatgtcctccggagccaccatagtggccgccgcggctgctttttccctggaaatatagcttacgattcccacaggagacaaatcgtcgggataccactcgtcggtgtcgatgctgatgacggtgtgcgccagaccgagccggtccagcagctcccgccgacggggggatttggaggctaaaatcagttcgttcatgggggaaggctcctttgatgcccctgacggggcggattgtgttttgctgcgttttatggagatccctcttggcagagggaagaggacaggctgcgccggagtatggcaatcggcccgcacaggctcactctacgctccggtaaaacaggccccgcgtaaattctttcggcttccagccttcttctgcgccgctgtaacggcgcagcacgcgcaggcattcctccgccggctccgtggtaaaacgcagccgggcgaaagccagtcccaggcgtttccagtcgtttttgtcggccagaaacagggttttgcagttttcgatttcgctgcggcagccgaaggcgggcagcacggggaaggcggcgccggtgcggtcggtcagaagggctggtgcttcggtgcagcggcaggcgccgcgccggggcttattcaggcagtgctcggtcagcatcagcggcaggcggccgtacaccacggcttccgtgggcagagccttgtccagatcccgaatctgctcggcgcgcagctcaaaggaaacggcggcggagcgaagacctgcccgctgcaaaaaccgcagggtttcggaattggtcacattgagaccccaatcgccccgcatgggaagtccagcctcccggcataagggcaggtgccccagattggacactgccgccccggcggcgccccgttctgcggcggcttgcagcaggcgcagcagccggggtcggtctgcgtctgtgtaaatgcggggcaatacggcccagagtatgcccgcggggatggccagaggcggcagagccgggatttcctccgccggcacatacagcagggcgggggaaagagccagcagttccgtactgacctgcccggcccgggcgacggatacgctcagccggggcgatgcttccccggcgtgttctttgcggggaagggcataggccccggtgcgccgcggcggcggggcgcaccggacttcttccagagcggccagcgcatcccgacgcagggcgttgaccgcggaagcaggcaaggaaaggcctccgtccaattctaccgcaatttctgcagcttcaaacgcagtaccgcccgtttttcccaaacgtgcgcgcagatcctctggggtcagaggtttgctgcgggcttcttcggggaccggaccggtggattctgccgagcggcctgccccatcccggacggtcaaacggcacggaacgccccggcgcacacaaagcgccatggacaccgggatgctccggtgttcgcagcgcccgtattctgtgcggacgtgcgcgaacagctcttttggctccggcgttttttctccgcgtacaccgaacatggaagcgtcgggtttgcctttgaagtagccatcggtaaagccgctgcgggaaaaggctgcctccaagtcccggcgctccgcggctgtgggacggcggttttcgcgcagcagcgcggcatagatggtcgtgaccacggccacatattccggccgtttcatgcgcccttccagcttcaggcaggagatgcccatagcggtcagctccggaatatgatcggccaggctcatgtccttcaggctcaggggataacggttatcctgtccttccagcgtgtagggcaggcggcagggctgggcgcaggtgccccggttgccgctgcgcccgccgatcagggcactcatggcgcactggccactgtagcacatgcagtgggcgccatggacaaatacttcggtttcaatgccttccagggcgcatacggcggcgatctgttctttggccatttcccgggccagcaccacgcgctgcaggcccatttcccgggcctgcagcgcgccgtctgtgttgtgcacagtcatctgggtgctggcgtggagcggcagatccggcgcagcggcgcgcacagcctgcagcacgcccagatcctgtaccagtatggcgtccacaccgattgcgctggccaacacggccgtttgggctgcagcggacagctcccggtcaaacaacagggtgtttagcgtcaggtagactttcacgccccgcccatggcagtagcgcacggcggcgcggaattccgcttcggtaaaatttttggcgttgcggcgggcattgaacgcgccaaagcccagataaacggcgtcggctccgcactgcacagcggcgcgcagcgcctccggtcccccggcgggggcgagcagttctggacgcatcaacgctgattctgcagtttgaagatctcgcgcttcagttcggagatctcatttttgcttttggatgcttcgtccagatactctttcagctgggcacgcagattttcagcgatctcttggcttttgaacagctcgtcggcaatattggcggcggtgagtactgcggcgtcagtatgcccggccttggtggaagagagaatttcggtcatcttctggtccacatacgcggccactttttccacatatgcgccgtcctcctcggccacgaaggtgtattcatttccgcagatcgttacggtaacacggtgatccatacgaacagctcctatctcttggggaatctctcccgcgcaaaccgtgcgggtatccctgtctattccaatacaaactacagtataacacaaacagagggtgtgggaaagcaaaaattgtgaactttttatctcaggccgtccgcaagtccggaaaaatggacaggctgctgttccgttgtttttccgcttttttccagcccctgtctaccatgtctaccgaatgtctacccaagcgggaaaggaaaacagctgggggacaagagatagaagaaaggcagcgacagcatctgccggcgaaatgtctaccaaattgaaagaccatacgttttgcaatccccggaa

SEQ ID NO: 4589 - DNA, 12310 bp, Unknown
  16S sequences of unknown bacteria
gttcgaaaattgaattaaaatcatagtctgccatatacaaaatctccttccatgttaagtataacatattttatcctatttattaaaaattatgtcacaaagcacatatttaatatattttgttttatgttatttataacatatttttttgtttttcgcaagattattgtcacctgtgacatatgcagaccataaatcagagttttcgccgcatcaactcttccttttcatcacaccccagaaaatgttcgcgcaaacccagccaagacctgttgccagcggcacggcatttctatctgtttcttctagattattggaagaattgattatgccagccaaatactatttctcatgtccttccacataggtgcattctcctgtctccaggcaataggcggccagttttcctccgaagacacagccgcagtccacggcgatatgtccggcaccttcgtagatcagtggttccatatctttccggatcagctgggtgggggtgtgtccggtcaccagatagatggaaggattggaataatatcgtctttcataatcggtccgttcgtagataaagtcctgaagtttatattgttccagaggtttcgactcttcaaaatcacggatgccgccatgaaccagaatgtaagttttgtctgcggctgtcactttctgataagaaggcatcttccgaaaataatccagaaattcacttcgttcatgaaggctcatatttaagaatccctgtgccgttgactttccgccgtctttgatccagtatttgcaggtcagcagatcctcggaattgatgatggttccatgtgggttcggtgtctcgccgatatcgaaacgctccaggatccgcagtgcccggtagtcatggttgcccatgatcgtcaccacattttttcgccgcatcacgtccttgaccacttccatggactcaggtccacggtctaccagatctcccagcagatataaagtatctctctctgaaaaatgaattttatctaataatttcatgtactgctcatagcagccatgaatatctgaaatcacgtagttcacagtcagtcctccgtctgtaagtggcttttattataacagactgcaccgcagaagtatagaaatcttgttctgccatggttgaacttcctgccaaaatatgaaataatgaacgcaagagagtcaaagagtgtttgctcactcttgacgaacggcgaaattattgagtgatgaaatcacaaaataatagagaaataataaaggggccgattatggagaacgaacatttacctgataaacagacaaagaaaaggacacatcataaaaaatcacaacacaaaaagaccacaacaaagaagcattcccgcaagaacatgaacagttttgtgtttcatctgacacagatctgtgtattgtgtattgtacttggtgcgatcggactgttttttgtggcaggatatccacagaaagtattttctctgtatctggaagcacagaccgttgccagggagtcatctgccagtgattttcagaccgggcaggtgggggaagtctatgattccgacggcaaccggatcgcattgctgcagaacgataaaaatattatttatctgacttctgaccagattccagaactggtaaaacaggcatttgtcagtattgaggataagaggttttacatgcaccatggttctgatccattcgctattgtgcgtgcggtgacttcactgcttggaaaggggagaatcacccagggaggcagtacgatcacccagcagctggtgagaaatatttatctgactcataccatccgctgggaacgtaaagtggaggagatctttatcgcccatgctatggaacgggaatattccaaagacgagctgctggaattttacatcaataatatttatttttccaatggatgttatggtattgaggctgccagtcaaaaatatttcagccgcagtgtgtctgacctggatctgtcggaaacggcatttttatgcgcaattcccaacaatccaagtatctatgatccgctgactcatgcggacaagacgatagagcgccggaatctgatccttcagaatatgctggatgacgggatcatcaatgagcagcaatatacggatgcggtaaatgagaagatcacgctgaatccgtacagcccgtcctacacccgtacatgggcacatacgtatatctatgaatgtgcaacgagagcattgatggaagtgacggggaaggattatgatacctgtcatgatatgctgtacaacaatggttacaaggtctatacctccattgatatggaagcgcaggaactgctacagacgacggtagatacggaactggaagattataatacgagaaataacaacggttcctatgcgctgcaggcatcagctgtcaccattgacaacacgactggtctggtcactgctattgtaggaggacgcagccaggatgatgtgtctgcggattataaccgggcttacttaagcttccgtcagccgggaagctccatcaagccattgatcgtctacacgccggcattggagcgtggctacacggcttcttccacggtggtcgattccaaggagccggatggaccttccaatgcaggaaattattccggagccatatcgcttcggactgcagtggaacagtccaagaacacggttgcatataaactgttccgggaactgacaccggaggtggggcttcagtatctgttgaatatgaatttttcatcaatccaggacagcgattatgtgttatccgctgcactgggtggattgagtaaaggtgcaagctgtctggagatgacttccgcttacgcgactctggaaaatgaaggtgtgttccgtcagccaacctgcgtcaccctgatcactgacagtaagggcaatgtggtcgtcaggccggaaacagaagagaagcaggtctatcagtcttcggctgctcatgagatgaccaacattctggaaggagttctgactcgtggaaccgcccatggaaaagcactgaccaatatgccctgtgccggaaagaccggaactaccaacgacaatatcgatggatggtttgttggctatacagcttactataccaccggcgtgtgggtaggatttgattctccgcgcagtacccactctctgtcgggagccacctatccgttggatatctggtacaattatatgacggaacttcataaagacaggtcttcacggaatctgaatgattgatgcgaaaaatggctgcacatttctgtgcagccactttcatacaatcaactattatcttcctgttacatacttataaatatcactacggatatactgttcattataatagagaactttcttattttctccatatacgatctgactgactcccagcaatgccgtatgtgccagacaaagaagccattccccttcttctttatctgcaaaatgaacatcaaaataatctttttcaaatactaccggaatctcatttgtcattctcacccgttttacacagattacatttgaattgtccaaaccgcccctgaacgacattccccgcaaaacctacagcagccctgagcggtagcaataaactgcgcttttatgctaccactcagggctgttatattttatatttttttatggaattggcgccggttcattactttcctgtgccgcagctccaccttgatcctgcgctggtgctgctggtgctgccgttccagcggctccgctgccggacaattcatattcactcggcacatagacaccgccactgtgaaccgtacaggttgctgcctgcagattggcactgataccatatgccgtatcctgcgttactgcctctgccactccctcctgcattgccggaagaagcagtttcacctgcggtacctgattcgggcacatgctggttgccagaagtcctgtatctgcacagatatttacgatcacatgatgatcacaggtctctgtcggcacggttccttctgcaaaatattcatttcgcacgataccttcccgaccatcactgtcacacaagccagccactgccagtttgcctgatttagtacagatggttgcctgcacaattcctgaaggtttctcaaaatctttattttccagaccttcatggatccggctcataactttcgcccacagcttcttgtggaagctggtctcaccggccttactgctcaactcatgcttatacccgttgttatcataaccaacccagatacctgccgtgtaatacggagacataccaacaaaccatacatcacggttttcggatgtagtaccggatttaccagcagtagtcatattggtgatcttcgccgaaccggaagttccgcctgcaccattgacaacatctttcatacagtcaatgagaagccatgcgttctgctcggagatgacctgcgtctcctccggctcgttgtccaggactacatttccctcattgtccacaaccttgctgtacattctcggtttgatatagtcacccttgttggcaatacctgcataagcggctgtcagttccagattggatacgccgttggtgattccacccagagcagttgcctgaccatagtctgtattagaaccctccagtgacaggctggtaaatccaaaccgaagcagataatcaaccgctaccggagtagtcacatccgtaatggtcttaactgccataatattcatggaacgggtgattgcctcgcgaatcgttgtccatccacggtatggagtatttttatcccagttctttaccagtcggctatccgcaccggaatatgcatacggtccatcatataatacagttcccggtccataacccaattcctcaaaagcaggcgcataagctgccacgatcttaaaagtagaaccagggtttctgagggaatcagatgcacggttcaaagttttgttcgcagtcttctctccacgtcctccgatcatggcaaccacttcgccagttgtctgatccatgatcaccatggaagcctgtggctgcatgataaaggaacaatcttcatagaccgtatcatcatctgtaattccaagagttgccacataaccatcaatagctgcctgtgcatcatccttggaactgtacagaggttcataattgctgtcgttctgtttatagtaggagatcatcatttcctgactgtaattggtggtatctccgttaggcttcaccacagtcatgacccattcaatacctacctttacattgctcgggaaattctcttcatttgcaaattcttcatccagcgctttttgtatactgggactttgtgtactgtagatcttcagtccgctgctgtacagcgcattggacgcctgggaatccgtatatccggctttttccaccagatcagcctttacctgatcaatcagctcatctacaaaatatgaataaactgtattcgtagtctccgcagactcattgttttcctgaatgcgtgcatatacatcatctgccagtgcgtcttcatactcactctctgagatgtacccctgatccatcatatttttcagaaccagtgcacgacgctctttgttcttatccggatgcttgatcgggttatacccgctggggctcttagtgattgccgcaataaccgctgcttcagaaatatccagttcactgacgctctttccaaaataccggttggctgctgcctgaacacccaggcagttttgacccaggttaatggtattcagatagctctccagaatctccgtcttagacatgaccttttccagctggatcgccagatactgctcctgcagctttctctcgatcttatccagcatgccatcctccgacatgaagtcaaagacattattcttcagcagctgctgggtgatcgtacttgcaccctgtgtagttctgaatccgctgactacaaatttgactcccgcacggaccataccctgaatatcaattccattgtgatcatagaatcgctcatcctcgatggcgataaatgcttcctgcacatgctttggaatattatccagttttacatacgtacggttggttccttctgccacaagctctgccgtcttgttaccatccgcatcatagacaacggatttataacctcttggcagtacactggcactggtaatatcaggtgcattttccataacacctttaataataccgattccgccgcacagaccggcgacgcccagcgcaatgatcagcaccaacagtgtcttcataaagacgactcccagtttcttacccatcttggtaccttttcctttgagagccttctgttttctggaggtgcttttcttactgtaattcattcgttggcctccttttattcgctcaatacttcgattgccttctgcagctggttatcatctgcactttctgtatctttatctaaaacaatatctggtgcgattcccacttcatgaatattatttcctgccggagtataatatctggacacagtgatcttaatggcagatccgtcgcttaaggggaacaggctctgcacgattccttttccaaatgtctgggttccgatcagggttcccactccataatctttgatggcacctgcgaagatctcggatgcactggcactgtttccattgaccagcacagccatctttccgtcaaaataatgctccgcatcggaatattcttcctgacgattgccatatttatcttctgtatagacgatcagaccttccggaagcaattcatccagaatattacaggtcacatctaccagtccgcctccgttgttgcgaagatcgatcacaagatcctgcattccttcttctttcaactcatctaacgcgcttaagaactggtcatctgtcacatcatcaaattctgtgattccaatatacccgatggtatctgtgagcattctgctctctactgtcggaacttcgatctttcttctggttaccgtaagatcgatctcttcagtgcctctcatcacactgatatccacagctgtgccttcttcccctttcagatctgtcacgaccagagacagatcctgtccggttacttcttccccctttaccttgtaaagaatgtcgtcaggctgaagtcccacttcttctgccggggatccttcaaacacctgtacaaccgtgatgataccggtggaatagtcctggctcagcatagcaccaataccgctataattgccattggagctctccatgaagctggcatactcatctggtgtataatagcaggtatatatatctccaagtcctgccatcatccctttatagatgccgctttctacattctcatctgtgtaatcaaagaggtagtactgattgatgtagtcgttcagttcctccatcttctctgtgatctctgcttcattttccagacttttgttcaggctggtgtgtgtgaacattttatagaaatagggcgcagcacatccgcccacgcccatcgcaaccacacacaacagaatgccacagagcagcccttttccaaaagaatgccgcttcggtctttcttccatctgttgtctctccttttttactcctcacattctatgttccaatcagtttacatagcccaacgggttcacataacttccattgacgatcacgccgaaatgcagatgcggtccggttgaaaatcctgtggatcccacagcagcgatggtctgtcctttggaaaccacatcaccttctgatacatagcgtgcagaagcatgcatatacaccgttgatatcccatttccatgggaaataaccacataatttcctgctgaagaactatatgctgaggtcgtcactctgccggaagccgctgctacaatggccgagcccgatgatgctccaatatcaattcctttatgataggtggatgctcctgcaaccggtgccgtacgattaccaaatgtactggtgatccgatgactagctggacatggccacatgaaaccggagcttcctccgtctccatcactggccgccgctttggcagctgccgccgctgcaatctgattctccacctgtgccagcagcttttcctgttcgttcagctgcttttcatattcgctctgttcgccggaagcggaattgatctgctcctgatagttgttgatctcggctgtcttggcatccatggccttgttgaccgcctgcttctgtgcctgcacttcactcagcagatcttcctgttcctgcttttcttcctccagagcttccttctgttcttttatgtcctgcatggtatcactcagcttctgcatcatccgctgatcatattcagacacctgtcttgcatattctacccgatttatcatatctgccatactgtccgcttccagaaatgcagccagcatcgacggattcccattttcatacaaatagcagatccgcgttttcatcatctcatactgatcctgcgcatccgcttctgctttttccagctcttctgtacgagctgctatatcatcttccgtagctgctatatcatcttccaactttttgatctgggaagaaagagtattcatctgtccgtcaagctgattgatatatgactgaagattgctcttactgttcttcagttccttgatcttgctctctacagtggaaatatcagacttcagtgacttgatctggtcaagcgcattatttcgcttctgttccagttcttttgtataactgtcgtcctcttcttcctcatcttcatcctcttcatcatcagacgtgtccgactcttctgccgcatacacactgtcaatcgctgtgctgaccctgccagacgcaaaagccagcactgccatgccaagcaggataccgatcgttctttttctcatgttcagcctccggcctgcgctcctctataccttcagatgtctctgaatggtcactatacttccaaaaaatccaattcccacacccagtgccatacctaccggaagcagagtctggaacagctgagctgcaggaagaaaatccatcacattgctcagtcctgtaaactgggttcccacataagtgatcagtttattatacaggaaatacagaaggatcagcgggaagatcgctcccaccagtccgatcacaataccttcaataagaaacggtgctttgataaaggaattcttcgctccgatcagtctcataataccaatctcttctcttctgacggagataccgatagcaactgtattattgatcaggaagatcgctactgccagcagcagcccgataattgcaaccgacacataactgaccagtctgttgaaatctgtcagcatggatgcaaccgaatctgaacggtttacttttcttaccttatccagtgattcaatataggtaaccagatcatcctgtttggaaatatccttcatatagatctcaaggttcgaactgtttgccagcgggttatcatctacaaatgcctcagcaacttccggattgccctcaaaatatttctcctgatagcttttccatgcttcgtccgctgaaacatagacaacctccgagacaccgtcacgcttggtcagtccctgcccgatctccaggatctcatcctctgtggttccttcgtcaaacagaaccgttactgcaactccctcttccgcttctcttacaaaatgctgaaaattctgtaccatacagaaaaagatgccaaacataaatatacatgctgccatggttgccatggaagccagtgaaaataacttgtttctccagatatttttaaatccctgcttaaagcagtatcctatcgtattgaatctcatccgatgtacccgctttctttctcgtcttccgtaatgattcccttctgcatacggatcactcgttttttcatcgtattaacgattgcctgatcatgtgtaactacaagcaccgtcgtaccgcgggcattgatctcctccagaagcttcatgatctctctggaggtcttggggtcaagatttccggtcggctcatctgccagcaggatatccggactgttcaccagcgcacgcgccagtgccactctctgctgttctccgccggagagctgtcttggaaatgacttgtatttttctgccagtcccaccagcgacagcatggccggaacatttttcttgatctctttgatcggtgtgacaacaactctctgggcaaatgccacattctcatatacatttctgtctttcagaagacggaaatcctggaatacacatccgatctttctgcgatatttggggatcgcgcgctttttcatacgtccaagattcacaccatttacacggatcattccgctggtgggttccaactccttcaaaagcagcttgatcagtgttgatttacccgaaccgctgtcacctactacaaatacaaattctccccgctcaatatgcaggctgatcccattgatggcgcctacgccattgggatattctttcaccacgttttccagtacgatcatggaaatcctcctaagtgtcttacttcagcagcggcatactgccgcgggagactttttaataatccagagtctccatatacttcatatattttacaaccatcagtgcgatcttgaacgtgatggcatcttcaaacacacgaatgtcaagtcctgtggacttttgtaacttatccagacgatataccagagtatttctgtgaatgtagagctgtctggaagtctccgatacattcaggctgttctcaaagaacttattgatcgttgtcagcgtctcttcatcaaaatcatccggcgatctgccgtcaaaaatctctctgataaacatcttgcacagcggaatcggaagctgataaatcagacggccaattcccagggagctgtacgcaataatatctctgtcatcaaagaaaatacgtcccacatccaaagccatcttggcttccttgtaggatctggatacttccttgatctcacctacaatggttcccagcgccacatgaatatcttctccatcctgtgccactacatctttcatggcttctgcttcctggaacatctcatcatagccttcattcaatgccagttcttttaccacgatcacattcttctcatctacggctgtaatgaaatctctggatttcgcaccatagagattacgcacgctgtccagtgctgcattcacacgctcgcggtcgctttctataataaataccacacgacgtacttctgttgcaatatgcagtttctttgcacggttataaatatctaccagaagcagattatcaagcagcaggttcttgataaaattatctttatcaaaacgctctttataagcagtcagaagactggtcagctggaaggacgccatctttcccaccatataaacgtcatcactggatccctttgccagtagaatgtactccagctgattttcatcaaataccttaaaaaactgatatccatgaaccacctgactgtctgccggtgatgaaataaaagccgcgacttcaccgccaaaattctccggctgtgcttctgttgacgcaagggtctgtccctccatgtccagtacgcacaggtcgatcctggtaatccccttcagtccatcaatggtgttttgaagtatctgattcgaaatcatagcatgtcctctcctttacaacgattctttttcccctgaaacccctagatactaaatatctacgttatataataatgcaaaatagcaaaaaaagaaagaacttttttatgaatttttatgcataaatccatgacagttcacataaagtgtagtcaaagaaaccccgatacaggagtccatccatgagttcaaaaaccagaatatgggtcttccatatgaaagaattgatctataccgccatctttgttgtactgggcatcgtactgcttctgctcctgatctttatgttctcagaagaccattcagaacgcactcttacggatctctccggtaaatatacagccgggatctacactgcttccatgactcttggcggcagtccggtggaaatcgcagtcactgtggaccgggactacatctcttccatcacctttcatcagctggatgagactgtagcagccatgtatcctctgatggaaccggctcttcatgatctctctgctcagatctgtgaaaagcagtctgcggaggatgtctcttattccgaagacagccagtatacctccatgatgctcatgagcaccatccgcactgctctggaaaaagccgaaaaataaaagaagccactcccggaagtcttatcttcgggaatggccttctcttccaagccagacaagcacagcgcctgccataataaagaagtctgac

SEQ ID NO: 4590 - DNA, 32759 bp, Unknown
  16S sequences of unknown bacteria
aagccggaactccgcacttacatagtaagtgcaaggggcaggcgtctgagcctctctgtgcgccctccgcgtaggagcaacccccacccgcaggtggatttaataaatctgaaagggtgaagctctttcttcatctttcgcaaaaggaaatccgaaagggcaacgtcctttcttcaccaaaatagcggcagagatttcctctcctgcagctgccgctgtattattcacttaaagccggttcagcctcgcggaacgcttattaatacattccgcccatgccgccgcccatgccacctgctgcgggagccggttcgggttcgggcttgcttactacgagcgcttctgtcgtaagaactgtggatgcaacggaggaagcgttctggagtgcggaacgtgttacctttgtcgggtcaacgataccgttttcgatcatgtcaacatactgttctgtgtatgcgttgaagccgtagcccttcttgccggaagccttgatcttgtcgacaacaacggagccttcaaagcctgcgttttcagctatctgacgaacgggagcttcaagagccttaactacaattgctacgcctgtcttttcgtcgccttctactgtgttgagaagagctgcaacgtcgtcgattacgttaacgtatgcagtaccgccgccggctacgatgccttcttcaacagctgcgcgtgtagcgttgagagcgtcttcgatacggagcttcttttccttcatttcggtttcggtagcagcgccgaccttgattacagcaacaccgccggagagctttgcaagtctttcctggagcttctcgcggtcgaagtcagaggttgtggtttcgatagcggacttgatctgggagatacgagccttgattgcttcggagtcgcctgcaccgcctacgatgatggtgttgtccttgttaaccttaacctgacgagcgtgaccgagctgatcaaccgttgtttccttgagttcaagaccgagttcgtcgcagattacttcgccgcctgtgaggatagcgatatcacggagcatttccttacgtctgtcgccaaagcccggagcctttactgcaacgcaggtgaatgtgccgcggagcttgttgagcacgagagttgtaagagcttcgccttcaacgtcttctgcgatgatgagaagcttcttgcctgcctgaacgatctgctcgaggaggggaaggatttcctgaacgttggagatcttcttatctgtaatgaggatgagagcgtcgtcaagaactgcttccatcttgtctgtgtctgtagccatgtagggggagagatagccgcggtcgaactgcataccttcaacaacttcgctgtaggtctcggcggacttggactcttctactgtgataacgccgtcggctgttaccttttccatagcgtccgcgatgagagtaccgataacttcgtcgcctgcggagattgtgccgactcttgcgatgtcttccttgccgtttacgggtttggatgcagccttaagagaagctactgcagtgtcaacagccttctggatacccttgcggattaccatcgggtttgcgcctgcggtaacgttcttcatgccctcgtggatgaatgcctgagcgagaagtgtagcggttgttgtaccgtcgccggcagcatcgttggtctttgtagcaacttcacgaacaagctgtgcgcccatgttttcagcgccgtcttcaagttcgatttccttagcgattgttacgccgtcgtttgtgataaggggagtgccgtacttcttgtcgaggactacgtttctgcccttaggtccgagtgtgattttaactgtatcagcgagcttgtcaacgcctctgataagtgcgtttcttgcttcgattccgtaaagaatatcctttgccatatatatgcatctccttcgattatttacttaaaattaattactcaacgatagcgaggatgtcgctctgtcttacgatattgtattcggtgccgtcgcactttacttctgttccggcatacttgcttgtgattaccttgtcgccgaccttaacagtcataacgacttccttgccgtcaacaataccgccgggacctactgcgataacttccgctacctgcggcttttccttagctgcgccgggaagaacgataccggtctttgtggtttcttcggcttctacgagtttaactactactctgtctgcaagaggtttgagtgtcataataataactcctttttctatgataaagatgtttgtaacaaatttatgtgttagcactcaattcggttgactgctaaccttatgctcatattgtaaccctattgaaagaaaaaatcaagtgttttttggagagtttacattttattaacatttatttttatagcaccctcccgccgcgtctgctaaaaatgaagaaaaaaagccaaccgtgccaaaatcgcgcccatgagtcgtataactcagtcgtgacgctgcttttcgcacagtcagctttacatattacttaaaattaatctcagcctacgtaaggtgagccgtcgatggtaacggtgcaggcgtcgtttctcgttatctcagccgcgtcgagagcgttgtcctgagcttcgatagacactgatcccgcgttgaacttgatggagccggcgcacttgataccgttgttgatggactggataacagtttcgccgccgtttacggtgattctcgaaaccgcctgaatagcctcgtcctcggagtagatattcagcttgccgccgtttatctcaacgtagccgaccagctcactttcggtattgtttgacttgattccgtcgctgatagcgtgaatgtcaagcgtgccgccgtttattacgaggtagtccttgcccttgattccgtgagcggcagcgttaatctcatattcgccgccttctatcttaagtccgtctttggaataaataccgcctgcatagttaccgttcacaacgagctttcctgcaccgtctaaggtgaggtcttcctttgagaagattgcagcgtcgggttcgtcgtccgtgggcttagcgaaaacgtagcttgtgccgtcggttacagtattcactgtgtcttcgtagagcgttataacagcctctgtggcgttctttattactatgcaggagctgtcattgttggtgatgcttgcgccgttcagaacaagattaagctcgcctgcgtcaacacagtcaacgtaaatctgaccgtcgtcgagtgtaccggacaccgcatatgttccggctttggtgatggtaatcttgttgttctcgtctatgtaaaccgtttcggagtcacattcggcagtcgcaccgttcagcttaatctcggtcgcgtgtttcagtattgaatcctcgccgccggagcatgaagtaaggagtatgggagtaactaaagccgcagccgctaagattgcaataagtttctttttcattttatcataaattccgccgctgtaatgtgcaaaacagacaaacagaatatccctttcgtaatgttgcgtgaaattaccacttaatcggtagtgtcaatatagaaattatacactaattcacaaagaatgtcaagagaattttactgaattcacaaaaatataaataaaaaccgcacgccggtccgatgcacctccgatttcgggagcacatcaaagactaacgtgcggaattattaattaagattcattcagatgaacgaccgtaattattcagccttcttatcagcgtcaacgagcttgattatagccatttcagcagcgtcaccgcggcgcggtccgagcttgtagatctgagtataaccaccgtttctgtcagcgtaagccggagcgacctcgtcaaagagctttttaacaacgtcttccttggtgatgaatgcaagagcctgacggcggcttgcgagagtattctttttgccaagggttatcatcttttcggcgagagagcgtacttccttagctctggtaagggttgtctcgattgaaccgttttcaacgagatatgttaccataccgcgaagcatagcatttctgtgcgctgtcggtctgccgagttttctggtaccgggcatgatccatgtcctccttttgcaaaactgttttcaccgtgtttcaggcgaactgtatcaatattttgttggattttgtgtttactgagttattcgagagtgtattccgtgttcggtaaagtcaaactgtatccgcgcgggaatatcttattcgtcgtccttcttgagttcaaggccgagagaatgaagcttctctataacttcttcaagcgattttttaccgaggttacgaaccttcatcatttcatcctcggttctgttgatcaaatcttcaacggtatcgatgcccgcgcgcttcaggcagttaaagctgcgcacagacatgtcaagctcctcaatggtcatctcaaggactctttcttttacagtttcctcgcgttcaaccatgatctccgcattctttgcttcgtcggataaatcgacaaacaaattgagatgttcgttgagtatcttggctcctaatgaaatcgcttctttggctaaaataacgccgttggtgagcacttcaagcgtgagcttatcataatcggtgctgcttccgacacgtgtattttcaaccgtgtagtttacattgtgaacaggagtgtatatcgaatctgtaaatatagtgcctacgggcgcagatacaccctggctgttctgctgatagagctgcttgttcttttcctgagaaacatatcctctgccgtggtcgaatgtcagctccatgtagaagcgcacattgttttcaacggtagcaatgtgaaaatcagggttaaggatctctatgtcagaatcctgcttgatgtcgcccgctgtgatatcgcacgcgccggttgtgtctataacgacagtcttcggtccgtccgtatgcagcttggctgtgatgccctttacattcagaactatctcgggaacgtcttccttgacaccgggaatggtagtcatttcatggagtacgccgtcgattttgatggatgttacggcaacaccgggcagtgagctgagaagcactctccgcagtgaatttccgagggtaataccgtagcctctctcaagcggctcgataataaactttccgtttcttccgtcttcgcttaaatttatagtcgcaatattcggcttttctatttctatcattaaataataaccctccgtctatgatttttgccaaatccacattgtagtattcttcttcggaatatagtaggttttcgcaaaatggctgtgagattttgcctccgcggaatcgtaataactgcccagaggaattccgttttgatccggcaattctcccactgtaggttattacttggagtaaagttcgatgatgagctgttcttcgaacgggaagtcgacgtcttctctcttgggaagagctacaacctttgcggaaagatcagctgtgttagcctcgagccacttcggaactactgctgtttccatctgttctgcgagagccttgaacttttcggaacccttgctcttttccttcagcgcaataacgtcgccctgcttgcagatgatggacggaatgtcaaccttcttgccgttgagagtgaagtgtgcgtgacgaacgaactgacgggcttccttacggctggatgcgagacccattctgtatacgatattgtcgagtctgagttcgagaagtgtgaggaggttttcacctgctacgccttccttattatcggcgatttcgtagtagttaaggaactgcttttcctgaacaccgtagtaacgacgagctgtctgcttttctctgagctggagaccgtattcctttacgttcttacgacctgctccgtgctgtccgggaactgtagtacgacgtgcaactgcgcacttatctgtgaggcagcggtcgcccttaaggaacagctttttgccttctctgcggcagagcttgcaggaaggacctgtatatcttgccatgttttcttatcctccttattatactcttctgcgcttaggcggacggcatccgttatgagggatcggagttacgtctttgataagagtaatgttgagtcctgctgtctggagagcacgaatagcagcttcgcgtccgttgccgggaccctttacataaacttctacagtcttcatgccgtgttccatagcgcccttagctgctgcttctgctgctgtctgagctgcatagggagtattcttacgggagcccttgaagccctgtccgccggaagacgaccatgctactgtgttgccctgtacgtcagtgattgtaacgatagtgttgttgaaggtcgagcggatgtgtgcgtgaccggcttctatattcttacggtcgcggcgcttctttatgaccttctttactgctttagccattagatcctctcactccttttacttcttcttatttgcgattgtctttgcgggaccttttcttgttctcgcattggtctttgttctctgtccacgaacaggaagaccttttctgtgtctgattccgcggtagcagttgatttccacaagtctcttgatgttgagagctacttcacggcgaagttcaccttcaactgtgtagtgattttcgatctcatcacggagctttgcgatatcatcttctgtaagatccttagctcttgtgtcaggattgattcctgtagctgcgaggatgttctttgcactcttgggaccgataccgtagatataggtcagagcgacttctacacgctttgcattcggaatgtcaacaccggatatacgtgccatttacgttttccacctctctttaaagttttaaccctgtctctgcttgtgcttgggattctcgcagatgaccattacatgaccatgacgcttgattatcttgcacttttcgcagattttctttacggaaggctttactttcacagtattttaccacctttcttattttaccgagctgagccgcagactttttacatccacagctttattatgacatacccgctcagttcttggtacgccacgtgattcttcccttggacgggtcatatatcgaaacttccactgtgaccttgtcgccgggtagtatcctgatataattcatcctcagcttgcccgaaatatgcgctgtaacgatcatatcattcggcagcttgaccttgaaggtagcgttcggcagtgcttcaaccacaaccccttcaaattctataacgtcatccttcggcaaacagtttttcctccctgatcgcagaaatatttcggtgaaaaatacaccgtcttaatattatatgttctttactcgcaatttgtcaagagtaattttcatttttttctgaaaatatcccgcttttcgcaaatttcgtatacctgcacatcttcgagcgcttcaaacacagctgttttgtctattttatcacgctccgatattatcctcagatggcgcggatttttgtgctttttctcatccagcttgtggagtctgccgtccgctatgacaacgggtgagactttatcgctctcgtctatagccacaacgaggaatacgcggtatctgtccctgccctttatcgactgcacgacatctccgaccgacggcattctgattctgcggttctgcggcatcagtcgacctttgtgagcacttcaactccgtcggcagtgagcgcgattgtatgctcatagtgcgcggagagcgagccgtcctttgtaacgaccgtccagttatcggcaagctccttaacctcggggcgacctacgttaaccataggctcgattgcgattaccatgccgcggcagagtcttgctccacgtcctgctgtgccgaagttcggaacgttggggtcttcgtggaggtcttctccgactccgtggccgacgtatttcttaacggtagagaatccgttcgcaacgacataaccgtccacagcggctcctatatcgcctatacgcgcgccttctttgccggcagcctctgctccgagttcccagcttctctttgtgaccgcgatgagcttctttgcttcttcggagacgtttccgcaggggaaggtgttcgcgctgtctccgtggaagccgtgtatgtacgcgcctacatctatcttaacgatatccccctcttcgatgattctgtgagatgagggaatgccgtggattatctcctgattgattgagatgcaggctgaaccggggaatccgccgtatccgaggaaggacggttttgcgccgcacttttcgatataatgtctaattttatcgtcgatctgttttgtggaaacgccgggcttgaccatttctccgccgaggaggagcgcttcgccggtaattcgtcccgctattctcataagcttgatttgttcgggtgtttttacgataatcatgatgccatctctgtttcctgtataatttttctttgaaagaaatttaccttaaagaaatttacttaactttgagaataaccgattctttttcgattattcgccgagagccttgaatgtgagggcggtcgtgtctttgagttcttcctgacctactacgatcttgagaagacctttgttcttatagaaatccttgaggggttctgtctgctcatggtaaacgacaaggcgggattttacaacctccggatcgtcgtcggagcgtcttgtaaggggttcgctgcactcgcagttttcgccgttcggtgagggcttatagacagtgtggtaggtggagccgcacttcttgcaaactcttctgccgctcatacggtccataatcttctcgtccggtacttcgattgaaataacgtcggttatctcaacgcccatgctgtcgagagcttctgcctgcggaacagttctcgggaatccgtcgagaatgaagccgtttttgcagtcgtccttcgcaagtctacctttaattatgttaataacaacttcgtcgggaacaagctcaccctttgaggtgtaggattttaccttttcaccaagctcgctgccggatgcgatttcttcacggatcatctgacctgtggagattgcgggaataccgaatttttcggaaataagctcagcctgtgttcctttgcccgcaccgggagcgccgagaaggataagattgatttttcttgccataatatctccttatatttaaacattcttttacaacttatattataccacgaattttacgcaaataacatacataaaatataaaatttccgtaaaaacagaaaaatgagcagcggtgaaactgcccattttaaagtgaatttttgattattcaaggaatcccttgtagtgacgcatcgttgtctgagcttcgatctcacggatagtttcaagaactacgccgactacgatgatgatggaagaaccaccgaatgcaagaccgtttaagttgccgccggagataaggttaagtatcagcgggagaacagctacaacggagagcaggagcgcgcctacgaatgttacacgggaaagaatcttagtgatgtactcagcagtaggacggccgggacggataccggggatggaaccgccgttagtcttgaggttgttggcaacttctataggattgaaagaaatcgaggtatagaagtaagcgaacgcgatgatgagtacgaatgtaagaaccgtgtagaggacgctgtctgtggcaaagatatcaaagaacttgtcccagaaagaaccctgtgcaggatgcgcgaacatctggatagtcgggaagatggagcagatggaggacgcgaagatgataggcataacgcccgtcatgttcaccttgagaggaaggttggacgactgaccgccgtaaacctttcttccaacgaccttcttagcgtactgaatcggaattcttctttcactgttggtcatccaaacgatgaagccgatcattgcaaccgcgagagcgatagcgaatacagcgataaggatacctgcccagatcggaacagtaacagctttgccgccgattgtgaactgggtcttgccgatgataaggttccagagctggagtacgaaagtaggaatacgggatacgatgtttgcgaaaaggatgatagagatgccgttgccgacgccgttttcattaatcttttcggagagccacataacgagagcggaacctgcgcagtagcaagttactataacgaaagctgcaaagaagcctgtctcaacgaggaggttataggacttcaggagctgatagtaaccgatagctgtgataagtccgagacctacagttacatagcgtgtgatctggtcgatcttctttctgccctcttcgccttcctttgagagattctcaaggtaaggaatagcgatgcagaggagctgaagtacgatggacgcagtgatgtacgggttaatacccagagcgaacagggttgcattagagaacgcagaacctgttaagatattgaggtatgcgaatatggagccgcctgtagccagcatagaagagctgagggcagcagagtttacataagggatcgggatcgctgtaccaacgcgatacagtacgatgacgaccattgtgtaaatgagttttttcttgaggtcagcgactttccaagcgtttttcagcgtctcgaacacttataccacctcggtctttccaccggctgcttcgatcttctcttttgcagatgcagagaaaacagatgcttcaacggttaactttttagttacatcgccgttgccgagtactttaagaccgtcgaggggtttgcggatgatgcccgcttccataagtttttcaagatttactgtatcgccgtcgttgaatttatcaagtgcggatacgtttacgatagcgtagtttgttgcgaagtggttcttaaagcctctcttaggaagctttctgtaaaggggaagctgaccgccttcaaatccggggcgtacaccaccgcctgaacgagcgttctgacctttgtgacccttacctgctgttttaccgttaccggagcctgcacctcttcctttacggaacttttcttttactgatcccggagccggtgaaagttcatggagcttcatggttaatcctccttttaagaaatataatttaaattctaatttcggagagcgttaagccttctccacggatacaaggtgagagagcacccttactttaccgtctattacaggaccggcttcgtgaacgatggaatcaccgatcttaacgagtccgagggacgctgctgtagccttctgattgggcttagctgcgatgaggctctttgtaagtgttactttaactttcatttacttaaaacctcccttagtctgttacctgctcaacggaaatgccgcgagtctttgcaacttcttcagcagttctgagagcctttaagccttcaaatgtagccttaactacgtttgtaggattgttggaacggagacactttgaacgaatattcttgatgcctgcgagttcaactaccgcacgaacggtcttgccggcgataataccggtaccttttgcggcaggcttaagaagcacgcggcctgctccgaattctccgaggacttcgtgaggaattgtgccgtccttgagagatacttcgatcatattcttctttgcgtcttcgattgcttttcttgttgcctcggaaacttcagcagccttaccgagaccgtagcctacgtgaccgttttcatcgccaacgatcatgagagctgcgaaacgtgctacacgaccacctttaacggttttggatacacggttcactacgacgagcttttctttaagttcgagcccttcgggattgaatctctttgccattattaatcctttctttagccgcgagtcaatacgcgactactgccgcctttttcgacagatatgatgtttaacttttgattaaacagtgtacaaaccggtcttctcagccgagatgcacggaaagcttagaacttaagtccgccttctcttgcacctgcagcgagctccgatacacgtccgtgatagatataaccgccgcggtcgaatacaacttctgtaatgccgcctgcgagagctttttctgcgatcttctttccgaccttcttagcagcttccttgttggagccgataccttcgaaatccttttctacggtagaagcggagcaaagtgttacgcccttaacatcgtcgatgatctgagcgtagatattagcgtttgagcggtaaacagccagacggggacgttcggttgttccggaaatttttccacgaactcttgcgtgtctcttaagacgctgagcgtttttatccttttttgaaaccattgtttacgtctcctttcattatttaccggtctttccggctttgcggcggatgtgttctccggagtacttaacacccttgccgtggtacggttcaggcggtctcttggaacggatttccgctgcgatctgtccgcaaacctgcttatcgtatgactttacgatgatggtgtttgcgtccggaacatcaaactttacgaggtcgctttcctcgaagtatatggggtgagagtgaccgaggttgagagtgagctttttgccttccttagctgctctgtaacctacgccaacgatctcgagcttcttttcgtaaccctgggatacgccgactaccatgttgtggatgagagtacgggtaagaccatggagcgcacgattttcagcttcgtcatcgggacgggaaacggtaactacagcaccgtcgacttttacagtcatgcccggatgtgctgtgtatgtgagagtgcctttcggaccctttactgtgataagattattttctcctactgttacggtaacgcctgcgggaaccgtgatcggagctctaccaattcttgacattgttaacctcctcttcccttaccagacgaaagcgagaatctcgccgccgacattttcacgtcttgccttcttatcggtcatgatgcccttggatgtggatacaagagcgataccgagaccgttcataaccttaggcatatcttcgcagctggagtagatacggagaccgggcttggatactctgcggagaccgtggataacctttgccttctggggaccgtacttgagtgttactctgataacgccctgcttgccgtcttcgataacctgcacgctcttgatataaccctcagcgagaagaatgtcagcgatggccttcttcatgttggatgcgggaatatcaacagtctcgtgctttgcgtcattcgcgtttctgattctggtcagcatatcggcgataacgtctgaaatctgcataataatttcctcctgtcatgcaagtaaatttttctcttgctgccgcgcagttctgattttatatcagctttgcccggctgctaccgatggtaaacaacggatattgccgcgttcctgtcggtattgacttatataactgcccacaggcgagaatttttcatctcacccgtcggtccagttcagttttggggtaaaacctttcggaattaccaggatgccttctttacgccgggaatctgacctttgtaggcaagttcacggaagcagatacggcagataccgtacttacggagataggcatggggacgtccgcagatcttgcagcggttgtattctcttgtggaatacttctgcgccttctgctgttttaagatcattgatttcttagccatttttattctccctcttatcttacttagcgaacggagcgcccataagtgtgagcagctcttttgcttctgcgtcggtattagccgtggttacgaagcaaatgtccataccgcggatcttgtctaccttatcgtactcgatttcggggaatataagctgttccttaagaccgagagcgtagttgcctctgccgtcgaacgcgtcgggattgatacccttgaagtcacgtactctgggaagtgcgaagttgaacagtctgtccatgaattcgtacatcttgtcgccgcggagtgttacctttgcgccgatcttcatgccctgacggagcttgaagttagcaacggacttctttgcgagtgtgggaactgccttctgaccggtgatagccgtgatatcagcgatgatggagtcgataaccttggagttttccttagcgtcgcctgcacctacgttgataacgatcttatcaaacttcgggatctgcatcacgctcttgtactcgaatttcttcatgagagcgggtgcgatttcttttgtgtatacttctttaagtcttgcagccatcgtctacctccgggattaaagctctgcgccgcacttggtgcaaacgcgagttttcttgtcgccgtcgatcttgtgagcggctcttgtgggcttcttgcatttgtcgcagtaaagctgaactttggaagagtacatcgcagcgggagcttcaacaatgccgccctgttcctgcggaggtcttgccttgacgtgcttctttacgatgttcgcgccttcaacgattactttgccttctttgggggatacttctacgaccttgccgatagttcccttggaattaccggagattacgataacctggtcgccagtctttacatgaagcttttttctcattacttttccctccattaaagaacttccggcgcaagggagagtatctttgtgaattcatgctctctgagctcacgagctacagggccaaaaatacgtgttcccttggggttcttgtcttcagcaacgataaccgcagcgttctcgtcaaacttgatgtaagagccgtcgtttctgcggagaccctttctgcttcttacgattacagccttaacaacgtcgcccttcttaacaacgccgcccgggcttgcctttttaactgcgcagactacgatgtcgccgatgttggcgtagcgtctgcctgtgccgccgagaactctgatgcacataagctcttttgcacctgtgttgtcggcaaccttcattaatgattgctgttgaatcactttagattcctcctgaatttttttatgagcgtgttcagtcacataaaatgcgattacggcacgccaattcgaggagccgcatccggctgtgcagctgataccactttctcagatatcctcgcgcttcggtgacgcataaaactacgccgaatcacctaagagccgcaccctcaaatgtttttatatattttttaagaaaaagttttaactgaccgccgtactaaaagctcgggattcctccacacggagcagcagcctcaacactatttggttcaagctgactccaccatcgtgtgacgtccatcccatataagccaaaagtacgccgatatagcccgcaggggcttccctgcccgacttattttgctttttctactatgcggacaagtctccatctcttggtcttggaaagaggtcttgtctccattacttctactgtatcgccgataccgcattcgttgttcgcgtcatgtgcgtgaagctttgcggttctcttgataatcttgccgtatacggggtgcttaacgtggtcttcgattgcaactgtaatggtcttgtccatcttgttgctgactaccttacccactctggtctttctgagagcgcgttcttccattttattttacccccttatgcgtttttcttctctgcgatgacagtcatcacacgagcgatttctttctttgtgtcggaaatcttatggggattgtcaagctggttgatagcgttctggaagcgaagtgtgaaaagctctcccttgagatctttcagcatctgttccagctcttcgcttgtttttgttctgagttctgttgctttcacagcttaaccctccacttcttcttcgagctgtgccttcgttgcgaaacggcacttgatcgggagcttatgcatagcgagacgcatagcttctcttgcgatttcctcggagactccgttcatttcgaacataactctgccgggctttactactgctacccaatattcaggtgaacctttaccggaacccattcgagtttcagcgggcttctctgtgataggcttgtcagggaatatcttgatccaaacctgaccgccacgcttggtgtaacgtgtcatagcaatacgggctgcctcgatctggttggatgtgatccatgccggctcaagtgctacaagaccgtagtcaccgtttgtgatcttgttgccgcgagaagctttacctttcatacggcctctctgaacgcgtctgtatttgattttaccgttcggctgtaacattagttagctcctccttcttcagcttttctgggtgctctgggcgctctgttctgctgaccgtctcttctctgatagggtctgccttctccgcgaggtgcgccgtctctgcgatctcttctctgaccgcggttgtctcttctgttgtctctgggctttctttcgtcagcgcctgtctttgtgcgggcaacttcggagagaacttctcccttgtagatccaaaccttaacgcctatcttaccgtaggtagtattagcttcccagaaaccgtagtcgatgtcggcacggattgtctgaagcggaatagtaccttcgtgatagtgctctgtacgtgcgatttcagcgccgccgagacgaccggatactgtaatcttgataccctttgcgccgagtctcattgtacggctgatggactgcttcatagcgcggcggaaggaaacacgtctctcaagctgagatgcaatgttttccgcaacgagctgtgcgcagagatcaacgggctttacttcgattacgttgatgtttacgggctgacctgctatcttggaaacagcagccttgaggttttcaatttcagcacctgctctgccgattaccataccgggctttgcgcagtgaatgtacactgtaaccttgccggtattgtcgcgttcgatctcaatcttgggaacgcctgcgagcagcagagtcttcttgaggtattctctgattttgtaatcctgaacgaggacgtcgccgaacttttcatcaggagcataccatctggaatcccagtttttaattacgccgacacgaagaccgtgcggattaactttctgtcccatttatcgactgcctcctcattctttttcagccactgcgattgtgatgtggctggttctcttcaaaattctgtcagcggagcctttgcctctgggcatcattcttttcattgtcatgccggggcaaacgaagcactcagaaacgtagagcttttcggggtccatatggaagttgttctccgcgtcagcagctacttttgtgaggagcttcagtgtgtgttcgcttgcagctttcggtgtgttcttcagaatgccgaccgctactccgagatccttgcctctgatgaggtcgaggacgatctttactttacgaggggagatgcggatgtgcttctgggtagatcttgtttccattattttatcctccctctcgattatttaccgttgttggacgtctttgatcctgcgtgacccttgaaggttcttgtaggagcaaattcaccgaacttatgaccgaccatatcctcggttacataaaccggaacgtgctttcttccgtcgtgtacagctactgtatgtccgacgaattcagggaatattgtagaggctcttgaccatgtcttgagcaccttcttttcgcccttttcgttcatctggcaaactctctcgtagagcttttcttcgatgaacggcgctttctttaaacttctgctcatttatagttgcctccttccttacttgctgtttctgcgtttaacgatcatcttgtcggtacgagccttcttagcgcgtgtcttataaccgagagcgggcttaccccagggagttacaggacccggacgtccgataggagacttaccttcaccaccaccgtgagggtgatcgcacgggttcattacggaaccgcggactgtaggacgaatgccgaggtgacgggtcttacctgccttaccgatcttaacggtgtcgtgctcgatgttgccgatctgaccgattgtagcctggcagtcggaacggatatatctcatttcgccggaggggagacgtaccattgtaagatctccttcacgacccataagctgagcctgtgcgcctgcggaacgaacgagctgaccgcccttgccgggataaagttcgatattgtggatgaaagtaccgacaggaatgtttgcaaggggaagtgtgttgccggggatgatatccgcgtcagcaccggagtaaagaactgcgccgtcagttacgcctacaggagcgaggatgtagctcttctttcctgcttcgtcctgaacgagtgcgatataagaggttctgttcgggtcgtattcgataccgatgactgtctgagcagtggtgttctgtctcttgaagtcgattatacggtacttctgacggtttccgccgcccttatgacgaacggtgattctaccgtaggagttacggcctgcgtgctttttctttgtggcaagaaggctcttttcgggggtaaactttgtgatttcctcgaatgaaggaacggacatatgtcttcttgccggggtagtcggcttatatttgattgtaggcattatcgtattcctccttaattagttcataccttcaaagaactcgattgttgcggagtcctctgtaagtgtgactattgcttttttccaggaagctgttttgccttcaacatagcggactcttttggtctttgccttcatgttgacggtattgacggaggctacctttgtgccttcaaacatcttttcaacagcctttgcgatctccggctttgtagcgtcctttgcaacttcaaaggaatacttcttcttggagatcatatccatggacttttcagtgataagaggtctgatgatgatatcttctacgaacttcattatgcgtacacctcctgaattttttctgcggcgccttttgctacgataaaggaatcgcagttaaggatgtcgtatacgttgatcgtattgtagagagctaccttaacgccggggatattggaaaggctttcgcgtaccttgaggtcgttttcatcaagaactacgagagacttcttctttgcgcctacagcggagagcatctttaccatgatctttgtcttgaattcagaggtttcgatcttatcgagaacgatcatatcgccgcttgctacctttgaggaaagagcggagatcattgcggtacggcgaaccttcttgttgagctttgtcttataaagacggggcttcggaccaagcgctacaccaccgtgtgtccactgaggagatcttgtggaaccctgtcttgcacggcctgtacccttctgcttccagggctttctgccgccgccggaaacttcggttcttgtcagagtagactgtgtaccctgtctctggttaccgagatatcttactactgccgcatggaggacggcgccgtttacgtcggctgcgaataccgcgtcggaaagagtcattgttccaacgttttcgcctgccatatttaatactttaatttcgggcatttcttatatcctccttccggttacgctttaacgctgtcacggatgaatacgattccgcccttcgctccgggaactgcgcccttaacagcgatgaggttcttctctgtatcaaccttaacaacttcgaggttaagtaccgtaacctgttcgttaccgtactgaccaggcatcttcttgttcttatatattctcgaaggtgtggagttcgcacccatggagcctgcctgacggtggataggacctgtaccgtgagtcattctgagaatatgtgtgttccatctcttaaccgtaccggaatatccgtgaccctttgtaataccggtaatgtcgaccttatcgcctgacgcgaaggtatcggcggctactacatcgccaacgttcatttcagctgtgttttcgagacggaattccttgaggtgacgcttcggggaaacgcctgccttcttgaagtgacccgctgccggcttgttaacgagcttttcgcggatatcttcaaatgcgagctgtacggcttcataaccgtcagtctcggttgtcttcttctgtgtaacggggcagggacctgcttcgatcacagttaccgggataacgctgccgtcttccatgaagatctgcgtcatgcccagcttctttccgatgataccttttttcatcgtttgcttcctcctgatattaggttattggttgggagccgtatgatatcgtcagccaaacgaaaggctccaacatgacctcacgccgccatcaagctgccgcatcgtaccggagagtactcagcagcttccgctctgtacggcttgggttaaggcttggtgtgggttttgacccgtaggggttattgactttcgctttaagctttgggttggggcttaaagcttgatgtcaatgtcgacttgacgctttaaattagtgaaaacttaaagcttgatgtcaatgtcgacttgacgctttaaattcagtcagaacttaaagtttgatgtcaatgtcaacgcccgcgggaagctcggtggacatgagcgcttcaacaaccttctgggaaggcttcttgatttcgatgagtctcttgtgagttctctgttcgaactgctcacggctgtccttatacttatgaaccgcacgaaggatagtaacaacttccttttctgtggggagcggaataggtccggaaacttctgcgccgttacgcttagctacctcaacgaccttagccgcagcctgatccacgagtgtgtgctcatagcttctgagcttgattctgattttttcctgtactgccatttttgcctcctgtaaagcatttgattaaatgatgtgaggcggcgaacacgcttccgggtgtgtccatgacttcattaattaatccgaaccgcatacgcacacagggagcgcacacaggctcgggaaataactctgccttgacacatgagagcggattcgagcgcccgatttactcggacatactccacgaaaattacccgtcggtcaagcagtaagagacgcggcggcaacctttcgcttcttcgcacatcaagcggtaatattttatcatattccgagaattaaatcaagagtttttgcattcattaagagaaaattttcacgtttttacgcctatgtttttgtatatttttaccccattcaatatcattcgccgctctctgccgttttattcccgcaaaggcagaaaaaacctcgcgccaaaacattgatatgtgattaaaaagtccttattcctcttgtgtttcgggaaattttgtgttattatataatgtaagatttttatcaaagaagggtatcccatgaattttttcgaccctgcaaaaaacaagcgtatcgcgatagtttcacccatcatcgccgcactcatcgccggaacgtactacatcgcgatgaagatggattttgacgcggatatcggtcattttgctcgcggctccgttccgatcattatatgcgtcgttctctccgttatctcgggtgctgttgcggtgctgtcgtattattccgcaaagaaatacgacctcgagagaagtgacaacgtccccccgacatatgttttcggcgcggtgcttacgtcaatcctttcgtttgcggttctcttcttcggactgcgcgacatgaagctcaccgttctctcagccggaggcacgttcacttccctttccgccgacaacaagctggagttcgtctcgctgctgctgtcccccacgatagccggcgcgtacatcctcaccttagtcaagcagacgcggaacacatggtcccacactctcttctgcattttcgccgcgctttgcatgaacgtgtacctcttcgcgtgctactttgatttttccctgccgctcaacagtcccgtgagaaactacataaccgttatggattccgcgatgctgctgttcttcctcagcgaagcgaagctgtcgtttgtgaatgagaagaaccgcgtttcctatgccttctcgtattttgcgtcattcctctgctcaacgataactctcggcataagtctcggaatgtttctcagccgtctgctcaaccccatcataaacgatcctcagccgaatcttttgaagtgcgcaatgtactttgccgtctccgtgaccgctcttgcaaggctgaactcacttggtgcaaaagaaaaaaccgcgccggataccgaaaacgaatccgaagctgcatcagaaaacgcaaactgatatttgtattattaaaggagctatataaattatggataacgaaatcaaactcacacttgacccgaatgccgctctcggtgcagccgccgcgcaagaagctccgaaagcacccgatcccacagccgcaaagcctgtcgagggaagcaagcctgcggttgaaaacaagcctgcggttgaaaacaagcctgcggttgaaaacaagccactgctcgatgaatcccagttcacggaagccgaaagacgcgcgataaacgactttgcaaagcagatagacataacaaactccgctgtcatcctcggctacggctctgttgcgcagaagaagatatccgacttcagcgacacagctctcggcagcgtaaagaacaaggatttcggcgaagtcggtaccatgattaccggacttatcacaaatctccagtcgatgaacgaggacgcggaggaaaagggcggattcttcggcgtattcaagaacacaaagcgcaagattgaaaacctcaagctgaaatacgacaagtgcgaggacagcgtgaacagcatcgtctccattctcgagcagcaccagataacgctcatgaaggatatctccatgttcgacgagctttacgaaatgaacctcgcgtacttcaaggagctttcgatgtacattgtcgccggaaagaagcgtctcgccgaggaaagagccaccactcttgtagagcttaaagaaaaagccgcaaagtcaggtctccccgaggatgctcaggcggcgaacgactttgaggaacagtgcgtccgtttcgagagaaagctgcacgaccttgagcttacccgcatggtttcaatccagatgtcgccccagattcgccttgtacagaacaacgacaccatgatgacagagaagattcagaccgttatcatgaacacaatcccgctttggaagagccagatggttatcgcactcggaatcgagcattcccgtcaggctatggaagccggaagaatggttacggacatgacgaacgaactgctgaaaaagaatgccgccgctctccatcaggctacggttgacgtaacaaaggaagcggaacgcggtatcgtcgacattgaaacgctcacccacaccaacgaacagctcattcagacccttgacgaagtacagcaaattcaaaaggagggacgcgaaaagagaatcgcagcggaagccgagcttggcagaatcgaaaacgaactcaagactaagctcatcggtatgcgttcctgatcgcagcttaacatgaaaaactcacgaattaaaatatcactcgcggcacggattctgctcatcatcacggtaataacgctgactgcgcttccggtactcgctgctgcatatccgaaaccgaagaacaacgtagcggacgaggcaggcgtgttatcagaatccacaatccgcgctatcgaaacggcgaacaaaactctcgagcttgacacgggaactaccatcgcggtctgcacggtcgacaccacgggagagagcgacattgccgaatatgcgcgcggtgttttcaaggaatggaagctcggcgagggtgtgctgctcctcatcgcaaaggacgacaagaactactacttcgtgcaaagcgtcggagttgaaagcgtactcacaaacgacgtgctgaaatccatccgcgacgaataccttgaagaagactttgaagccggagatattaaccgcggcgtaaacaagtgcgtcacaaagctgaaaaacgtactcaccgcaggaatacccgccgcaaaaacttcagacaataccacagataccgcaaattccgagcctacgggaacgacagtcggcagtgtcatagcaggatttttcaaagctgttctttggatagtgctcatcgcagtcgtgcttctcgtcgcgttcttcgtgctcgccatgtacaatgaagacgccgcagcactgttccgcaagtacatactccgcaagcccgacaaccgcagaatgcccgaggaatactacgacgaaagactctacggcgatccgcgcagaagacagaaccgaaacagactgccgcagggacaagctcagccgagactccgcgcacccgaggacagatattctcagggtgaaaaccgctgcaactacaattctcagccgcgcagaagaccgcaaaacagacagaacggacagtacagccaaaatccgcgtccgagaaacaatgcacagtacaacggtcaaggctacaacagaaatcagaaccgtcagagaagcaattcagaccgtgacggctactctcagagctatcagcagaattcttattcacagaataattactcccagaattcatattccgacggctccgaaacacgcgcattcaatattcccactcacaacggacagaatcagggaagataatatcctaacaaattacaacaaggtaaaaacatgatatccatcagcacaaacaacttagcataccgcatcgggacccgcgtaatactcgaaggcatatcctttgcgatagaagacggcgaccaccttgcgatagtaggtgtgaacggaagcggcaaaagtactctgctccgtatgctgtgcggcgaatacgaacatgacgagggcagcgtattcatcgcgaaggacaaaacaatcggtatgctccatcaggacgacgcgttcaacgtgataaaggtcggagttgagacggaaaacgtaaaatcccccgtcaacgacaccgttctcggtcagatgtacgcggtgttcccggagcttgtcgaagccgaaatgaagctggagagattacagcacgagcttgacaccactcccgccgaggacacggacaagctcagccgcctatcgaatgaattaagcgctgtgaacaacagatacatccgtgatggaggactccactacaagtcgcgctgccgcagtattctcgtgaacctcggcttcggcgaagagtactttaactctcccgtttcgcagatgagcggaggtcagagaacacgtctcgctcttgcacgtctgctctcacgcgaacccgatattctcattctcgacgagccgacgaaccacctcgacaccgaaacaatggagtggcttgaaaatcacctctcggcttatcctaaaaacaaaaccatcatcctcgtatcgcacgaccgtctcttcctcgacagagtaacaaacaagaccctcgacattgaaaactgcggcgcgaagctgtacaaatgctcgtactcgcagtatgttgtcgaaaaggaagcgtaccgccgcgagatgcagaagaaatacgacctgcagcagaaggaaatcgcccgtctcgaagcgtacatcgaacagcagagacgctggaaccgcgagcgcaacatcatagcggcggaatcgcgagaaaaagccatcgcccgcatggaaaaggtcgaaaagccgaaagctcttccgaaatccattcactttgcgcttgaatcctcgggtgaatccggcaacgacgtacttgatgtaaagcgtctcacaatgggattcggcgagcatgtgctgttccgcgacctctcgttcctcgtgaaaaagcacgacaggctgttcatctccggaccgaacggctgcggaaagtcaacacttataaaactcctgctcggcaagcttgaagccctgtcgggggaaattgagttcggctacaacgtcacagtcggctactacgatcaggaaaaccagaatctcgacgagaacaacaccatcctcgacgagctgtgggacgcatacccgaacctcacccagacggaaatccgaaacaccctcgctatcttcctcttccgcggagacgatattgagaaaaaagtagaggttctctcaggcggagaaagagcgcgtctcacactggcaaagctcatcctctcccgaatgaacctgcttatactcgacgagccgacgaaccatctcgacattgaatcccgcgaagcacttgaaaacgcgctgaaggactttgacggcactataatctgcgtgtctcacgaccgttacttcacacgtcagcttgccacaagattcatcgacattggagaaaacggacttgactaccgcggaggatatgacggctactgtgaatacaaggcaaggcttaaagccggaaaagaagacctcacgcagtatgtgcagatagaatcctcgcagaaggacgaatatctcgagcgaaagaaatcgaacgccgaaagacgcaagcaggaaaagcacatgaaggaagtcgagcgcgagataggaaagcttgagcatgagcttgtcgacatagacgattttctcggaagtgacgaagccgcagtggactacgtgaaagccgcggagctttacgacagaaaaatagtcatagaggatcgtctcatgcagctttacgaggaagaagaagcctacgccgcggaaaaagaagcggaaaacgcagaaaacgcataacaaaaatgaccctgttcgtatcgtccaaagtcagattctttctaacctcggactgtttgaagggtcattttttattttattaaattaagcagactgtcgtcgtcaaatcccgtcagcgaatacagctcgtcaagcgttccgtgaggtatttcggtgtcgacgactgctttaattttcagcctgttcttcattccgcgaagctttaactctgccgccagcttttctccgatgccgccgctttgcgagttttcttctattaatataatgtcctctcccataagctcgacagctccgtctggaatggggtacacttttttcagccctatcagccgaattccgctcattccgctcctctgtatcagtgacaaaattcgcgtcgtgagtctgccggaggtgacaatggttttgcctgctctctccccgatgtcccacatggtgtagtctttgcagttttcgttcggtgggaattccgcgcagacgtcacgcttcacgttgtccttcgggtagcgtattatcgtgagcttatcggaagcaagggagaggtcaatctcattctccatcgtgtgctcgtcgtatgcgtcgtagatattcacattcggcaaggctgaaaacagcgcgtaatcgaacactccctgatgcgtaactccgtctcccggtacgattccggtatgtgagagcatgagagtcagcggaatatgctgaagcgacacgtcatgccaaagctgatcgaacactctctgcgcgaaggtggagtaaatcaccacgacaggcttcatctttccgagggaaagtccggctgacattgttaccgcgtgctcctccgctattcccacgtcgaaaaatctgtcggggaacatatctcggaacatatccagtccgcagccctttgacatagcggcggttatcgcgcagattctctcgtcctctccggcttttctgcaaattatatccgagaaggcgtcggtgtaggttctctcggacgcatggcagaggatatttttcgtgtcgtcaagctcaaacggggacgtgctgtggtatctttcggggtatttttcggcgggagcgtatccgaatcccttcttcgttttcatgtggacgattacgggaccgttcttctgcttcgcttcctcgagaaccgcggtcagtcgcttgatgtcgttgccgttcacaggtccgatgtattcaagcccgaacgactcaaaccacgtctctgaattcgtcagtctcttgaaaaaatccttgaaccgcctggcaaacgctaccattccgtcacccacaagcggcactttctcgagggtatgcttcagcacggtcttgaagttgaagtagctctcgctcgtgcggatatacgaaaggtagtccgacagcccgccgacgtttttcgagattgacatttcgttgtcgttcagaatcacgatgagcctcagccgccttaccgccatttggttcagcgcttcgtatatcattccgtttgtgaacgagccgtcaccgatgaccgccactacccacgatttgtttccgcttattctgttcgactcggcaattccgacagctgtagagagtgatgttcccgaatgccctgaggtaacggtgtcgtattcgctctcgtcgcggtttgtcatgccggatatcccgccgagctttcgcaaagtaaaaaatctttcgtatctgccggtgagtattttgtgcgcgtatgcctgatgtccgacgtcgaaaatcagtctgtctcccgctttgcagtcaaacacgcggtgcagcacaatcgacggctccaccataccgagatttgacgcgagatgtccgccgtttttcgacgtagtgtcaataatagtccgtcttatttcgtcggcaagttcagtcagtgacgattccggcagctttttcacatcatccggggactttatttcgtcgagtatatagttttcgctcaaaaaattcagtcctctcaatttccgccctgcgcttcttcggcgaggttggtgaattttgtgaatcgtcctatccatccgagctttaccttgtcaagtgagccgtgacggttctttgcgacgataacctccgcaacggactggtcggtagtttcgtccttgtagtattcgtctcggtagaggaacataacgatatccgcgtcctgctcgattgcaccggagtctctgaggtcggacagcatcgggcgtttatcgggtcggttttccggtcctctcgaaagctgtgcgcagcatattaccggtatcgcaagctccttcgcgagaagctttaatcctctcgaaatgtctccgacttcctgaacacggttgtcgttgtgtcggtcgccttgcatgagctgcaagtagtcgactacgacaagtccgaggttcttcacgcggcgcagctttgatttcatcgcagtaactgttacgcccggcgtgtcgtctatgagaatctccgtctcggaaagtcgggaggaggcgtatgctatggcgttccagtcctccgctgagagagtacccgagcgcattttgtagctgtctatctgcgcttcactcgagagcatacggtttgcaagctgctccgccgacatttcaagcgagaacacgcatacggttttctttgtgcgaatcgcggcttccgtggcaatgttcatggcgaacgaggttttacccataccgggacgcgctccgatgagcaccaggtcagcttcctgcattccgactattacgttgtcgagagcagtgtagcctgtcggagtacctctgagcgcttcggggtcctgcgagagctttgtcagtcggtcgtatacctgtatgagagcgtcgcggatatgtacgaaattcttgttttccctgccctccgcgatacggaatatctttgactccgcgaactcgacgaggttttccgcgctgtcgtcccctgcgtatgcggcttccgtgatgtcgtctcccgcttcaatgagctgcctgagcaccgccttgtctcggacgatatctgcgtagtcctttgcgtttgcagcggtcggaacagcctctgccacaagacgaaggtattccctgccaccggattcatcgtaggtaccgctttttacaagctcgtctatcagcgtaacgacgtcgatattctttgactttaaatacatcgactgcatcgcgcggaaaatctcggtgtgctccggaacgtaaaaatcctcggctgagataagcggcgcgatttcgtccatgcacatagggtcgatgagaatggaaccgagaagagactgctccgcttcaagcgaaaacggcagctttctgtcaagctcgttattcatttttctcacctgccttatgtattaaagttatttaatcctgtttaatatttgctcagcctgcgtaaacgaggacgttcagcttgccggagatttcaggatagagctttacgtcaaccgtgtatgtgccgtagcctttgatgttttcgccgagcaccacttttctcttgtcaacttcaataccacactgttctttgagcgcttccgcaatatcctttgtggtaacggagccgtagaacttgccgtccgcgccttcctttaccttgattttcacgagagttcccgcgagcttttccgcagtgtcgcgtgcagcctgtttttcaagctcgatgcgtctctgctttgcggcttccttgttctttatgtcgtttaaaacctttgcgtccgcttcaaccgcgagcttcttcgggaaaaggaagttgcgcgcatatccgtcggacacattgataagatcgtccttttttccctgtccctttacgtcctgtaagagtactactttcattattatattcctccgatattttgtagatttactttatgaatttgtctattgattccttgagcagagacaccacttcttcaacggtcttttccctgcactgcactgccgcggaatcaaaatgcccgccgccgcccatgttttcaagcacgagctgcacgttcaggcttccctgagagcgagccgaaatgtgtacgacgtcgcctatcttcaccaccgcgaacgacgcttcaattcctacgactttaagcaggttgtccgccgcctttgccgctataactctgtcgccgtcatcaaggtcgtccactatcgtaatggcacaggagccgcgatatatctcaacatttctcctgaattttgcctcgcgcatgtagtcgtcaaagctctcgcggaacagctccttaacatcggcagtggatgcgccgcggtctctcaggtacattgccgccgagaaagtgcgcgttccgacgttttgagtgaactgcttcgtgtcgagagtgattcccgcgagcatgacgtcagcctcagccggagataagtcgtccttcggcagcacctgctccagcatttccgcgacgatctcacaggtagacgaagcggaaggttctatatactcaacgtcaggctcggttttgaactccgataccttacggtggtggtcgattacagcaagcttttcggttctgtaggcaagctccggcagctccgtgttttccagtcgattcacgtccgctactatgacgagagttcccgtttcaagcagatcaagtgcgcgcgcggagtccacgaaaaccgacggatagtcctcatcggcttcaagtatcttgcggcatccgaaaaggttcgcgtcggtcatgtcaagcacgatgttcgcgtcaactccgcagtatttcacgatacgcgaaagtcccacacacgcgccgattgcgtcaaagtcagcctttttgtgacccatgatgagcacgtttgtcgcttttttcgccgcggacataagctcgtttgacacaactcttgcccttacgttggtacgcttctgcacgccctttgtaacgccgccgaagaagtcaatagatccctcgcccttcaccgcagcctgatctcctcctctttggagtgccatatcaagcgcggcatgtgcgtttttctcgcggtcacggtagctttctcctatgccggacacacccattgatattgtcaggggaaggtttgtgtctcccgctctgactgcacggactcggtcgagaatgtcgaacttgcactctatcagctcgtcaagaacggactttaccgtgacgaaaatgtacttgtccctctcgtattccttgagaattccgccgtattcgtcagcccagtcgcgtataatctcgtcgattcgagccgcggcgggtctgtactgctcgctgtcgtactgcatcatttccgaaagattgtctattataatatagcaaacaactgtctcctcgctctccattttggcggtaagctcatcaagctcggttgtttccgtcgtcatgatgagcgcgaagtcgttgtcgtcggtcttgatatggttgtatttcacgaggaatgaacgtccctcgcaggtaagtcttgcacctctctcgcttctgtcagcacggatgtcagcaagtgtaactccgaacagctccgacacagactcgccgtagagcttgtttttctcggaatgaagctcttccgtcgcgttgttgtaccagattatcctctcggacgagtcgcatatgaaaacgggggtgttcatcttaacgacggcgtcgaacattatcctacccatgacgggcgcgagagtttcgtttccggatttaatcttcctctgcttttcgagaaggagatacgcaagcgcacatattcctacatagagcacgccgacaaaaaccccgctgtagagcttatccgcctcggtagtgagagatattgcgatgtacaaaacaaggcagacaatagcggacagcacaaatatcagcgcagtctcgcgtcttatcccctgcatcataccacgcaggtcgtttttctgtttggagtttttcggcatggttgacacctttattagttatagttctgatttatcttttcttttggttatggctttgaaggctccgcagactgacattatcacaagagacacgcgcattccgagaagaagcaccacgaaaaacgcaacaataatgctgacggtacttcgcttgttcacggaaaaatactcgtcctccggctttttcaatacctcgccgataccgacagccgcacacgggagtatcataacatatgtgagacttttcatcataacgaaagcaagctcaaagtcactgccggaggtaaggaagaacatcaccgccgatgcaatatagacaagcgcgaacgttttcggcattgtaatctcgcgcgacattgaaatgaacacgtcctcgcagtcaagcacacggaaaagcagcttcgcgagaatatccgagatgt

SEQ ID NO: 4591 - DNA, 5730 bp, Unknown
  16S sequences of unknown bacteria
ggagggctgcgcggtggcccaggtctgtatgcgcaacggcgttgccttcgcggcgctcaagtccgtgtccgaccggctgttcagcaaggcgcagcaggaggagtactttaatttccccgaggcaatgaaaaaactgaacgccgtcgtgctgcctctggcgcagcggctgctggagaagatgccgtcatgaaggatatcgcaagctttcaggttgaccatacgatcctgacaccggggctgtatttctcccgggcggacggaccggtccatacctttgatctgcggctgaaaaagcccaacaccggcgaccttttgacaaacacgcagctccactcggtggagcatctcatcgcaacgctgctgcgcaattccgcgcagcgcgacagtgtcgtctacttcggccccatgggctgccagacggggttttacttcctgtttgacagccggaccctgccggacgcggcggccatcacgctgctgcagcaggtatttcagcaggcggcggaataccccgggccgatgcccggcgcatctgccgcgcaatgcggcaattaccggaacctgagcctggcggagggctgcgcggtctgcgcctggtacgcaggcgttatccgggattggaccccggcgcgactggcctatccccagcgcgcgtgagcataggattcaaaacggagcatcatgcagaaaggatggaaacgttatgaacaaaatcatcaccattggccgggaattcggcagcggcggccgggaatttgggcgccgcctggcagagcagctgggttacgcgtattatgaccaggagattatccgggagattgccaaccgcacagcgctctcggaaaagtatgtgcagcagatcgtcgagcaccgcccggtgacctctttccccattcatacgggccgtagctttatgatgatgtatgatccgctgatggagcagaaccagagcattttccgcggccagtgcgagatcttgcagcagatggcggaaaagtcggactgcgtcatcgtcggccgctgcgcggactatattctgcgggaccgcaaccccctgcgcatctttatctatgccgagatgtccagcaagctgcagcgctgccggacgaaggtccacgagacccggacggacaaggagctgcgccagcagatcctgcgggtcgataaggatcgcgcccattattatgaatattatactggccagaaatggggtgcccgggagagctacgacctgtgcctgaatacgacgaacatcgagatcaagcaggccgtttccatggtggcaaagatgtttggctgagccgaaaaagataccacattcgggaggtttttgtgagcaagatgaaactgtacggcggctattcccgtgccgcgaaaaaaagcggggcggcagtagccggtgagaaaaagaaaaagcgtaagcgtacggcggtggaccggatcatctccgtcctgttggtgctggtcgccctggaggggctgtactgtacggcggtcttctccgacctgggctttatcaaaaagtaccgggagatgtggatccagacggcgatgtcgacgatgcgccaccagtggctggccacggcgtttttgcctagctgcgtcattgacgaggtcatggcgaaggtcgagcgggcgcagcaggcccaggtgggcgtcaacacccagtggaccgaagaggaccagaagccggaggagacagagcccaccgttgccaccccggaggacgaattctacgagctcttttgggagctggatcgcagcagcatggagcggtacataaaggaaaaccctgatacgctgtctggcggctggggcaagatctccatcaacgaagccgggctggatgacgacggcacgtccatccagacgacgatgggcgagcaggtcctggccattgatgcggccaataagacgctggtcgtccgggtcagcggcagcgggtatcgcggggcgctggtcattgcgaaagacccggcgcagctgtcgatctacccggcgaaaaatctcggcagcgtcggcgaaaacgccgggagcatcgccgagcggcataatggcatcgtcgccatgacggccagcggctttatcgatgacggcggcaacggcaacggcggcaccctggcgggctacgccatgatgaacggcgaggagcggggccagcatatgtactccggctattacaagcgcctggagctgcatgaggataatcacttctatatcaccgacatcggcaacaccgtcaacgccgagacgacggacgcggtggaattcaccccggccctgatcgtcgacggtaaggtcctcgtcgatgagaacaacgactggaacggcctgaacccccgggcgtgcatcgggcagtccgagaagggcgaaatcctgatgctggccatcgagggccgcctggccagttccctgggcaccggcgtggccgagtgtgccaagatcctcaagtcccacgactgcatgcaggctatgaacctggacggcggcacctccgccattttgtggtacgacggggagtatatcattcgctgctccaaccaggcgctcccggcaggccgcaccctgcccaacgcctttgtatatgaaaagcttgccaattgatcctggctcttgcggaagtggccgtagaaagggctttgtatgcgcgaccgccttcggcggaatcttatcaaatagaataggagtggatgaccaatgaaacagttactcaaaggcggcaccgtcgtctccggcagcggcgcccagcgggccgatgtactggtggagggcgagaagatcctggaggtcgccccggatatcacctgcccggcggcaaagaccgtcgactgcgccggaatgctcctcttcccgggctttatcgacgcgcacacccattttgacctggatgtctgcaacacgacgacggcggacgatttccactccggtggtgcgtcggccctgcggggcggtacgacgatggtgatcgacttcgcctgccccaacaagggtgagagcctgcagtacggcctggacctgtggcacaagaaggccgacggccgcacagcctgcgactacggcttccatatgaccatcgacgactggaatgacggcatcattgccgagatccccgagatgttccgccagggcatcacgtccttcaagggctatctgacctaccctgccatgatgatcggcgacgagcagatgttctacgccctgcagaagatgaaggagtacggcggcattctgggcgtccactgcgaaaacgccggcgtgatcgacgcgctcatcgcggagaagaaggcggcgggcgagctctctccggcgtcgcatccccagtgccgcccgtccatgtgcgaggcggaggccatctcccggctgctgaaaatggcgtatctggcggatgtgccggtcgtgatcgttcacctgtccagcctggacggcctgctggagatccgcgcggcccgcgccagagggcagaaggtctatgtcgagagctgcccccattatctgctgctggatgacagccgctattcggagcccgactttgccggggcccaatatgtctgcagccccccgctgcggaagcagagggatatcgatgccctgtggcaggccctgcgcgacggtgagatccagacaatctccaccgatcactgcagcttcaccctggcccagaaggacgccgggcgggaggacttcacgaagatccccggtggcatgaacggcgtcgagacccggggcattctgatgtacacctacggcgtggccagcggcaagatcagcctggagcagatggtccagatcctttctgagaacccggccaagctctacggcgtctatccccgtaagggcgtcattgcccccggcgcggatgcggatatcgttgtctacgatccggcgggcgagggcgtcatcacggccaaggaccaggtctgcgcggcagactacgccccctacgagggcttccgggtccagggtcacatccaccaggtgtacctgcggggcacgctgcgggtgaatgagggcaaggtcctcgatgactgcggcggccagtatatcccccgggatcgctgctgtctgtaagtgctggtatttatgcgctaatttgcataaaaagttgaaaatgataaatcgggaaggcccggcgattttcgtacgccttcccgattttcctgttttgttgggggaaccccccaccccaaagcgggtaaattcggggcgaagtggaggataaatttaaaatattacaaaaaattccagaaaaaacaacaaaatgtcacgttttaggcttgcagaatgcgtatacgtggtgtataattgccctggaatatgataaagcgaggttcgacttatgagccgaatagacaaggtgaattattatctggatatcgcggagacggtactggagcgctccacctgcgcccgggagcacgtcggcgcgctgatcgtccggaatgacgagatcatcgccaccggctacaacggtgcgccccgaggtcggtccaactgcatcgacctgggctactgcatccggcagcagcgcaaggtccccgacggtgagcgctacgagatctgccgcagcgtccacgcggaggccaacgccattatctccgccgcccggcgtgactgcatcggcgggacgatgtacctcgtcgggaaggacgctgggagtggccagatcagcgagaacaagcccccctgtcccctgtgccggaagatgctgatcaacgctgggctttcccagctggtcgtccgtggcagcgatgggaaatatgaaatctacaacgtccaggactgggtctttgacgacgactccttagatctggagccgtaaaccagcggcctgataacaggcagcagcctgaaaagacgccccgagcgggcccctagataggggactgcttggggcgtttctatgcaaaaacgcgtattgccttggccggggccacaggcggcaaggcgggtgatctgaaaagccacggcgctgggcaccccaaaaggcgcccttgtgtaagggtgagacttcaagagcgcgtagcgcgattggctaagtcgaaccccatgcagagctaagggcgctggcagcgcgggagcgctgactgagggattgatgcagagcaaaaacaagtttctagcgcagtactcgactactccagacttcaaaagtcaagtttgagaatctttccatgctaatatctaccagacaaaagtgttaccgccctccgggggcccgattctttcttctccagcgaagaaagaatcggggaagaaagacgccgcttagggcagggggcggtccccctgccctaagaacccacccctgcatacgacattgggactacagccgcacactgtacgaggtgccagacagttttgtaactgcatccgtgccttgtaggctggtgagcagaccgcttgccgcttcgctgtagcttacgagggtgcggaggtggcttggggggctttggtttttgggaagcggctagcgttggatgcggccggaggtgtcgccttgggacaggcgttcgacttctgggatgctgacgcggttgaaatcgccggggatgctctgcttgagggcggaggctgcggcggcaaattcgatggctgctggggcgtcgtcgcctcggagcagggcgtagatgagcccggctgcaaacgagtcgccgccgccgacccggtccaccagctgcaggcggtacgtccgggagaaatggctctggccgccagtgtagagcaggccgc

SEQ ID NO: 4592 - DNA, 3399 bp, Unknown
  16S sequences of unknown bacteria
ccgccgagtattttcatattgcgacggaattcctcctgcctgcgacgtttttcgcgcctttttgccatctcacgccgccgccgttcttcttcctgccgtctgcgcatttctttcggtgagggtcgccgcctcggtgggtttccgcgcggatttgtgccgtattgaccgttcatttcatcacctccgatacattattctaatttctatttcgtttcgattatcgtgaaaaacgggctttcgggcgagttcaccatgcgaatctgcgcgatgctgtacctgaagcgggagacagtcgagaaatattccgtcagctccttgccctcaagcgcaccctcgggatgtccgggataaaccgcaacgcagagaatcgcgtcctcgccgagcatttccatcgcgtttttcactgcgggaagggtagttgtgcgctttgtggtgagctgcttgtgtccgcttccggggagatagccgaggttgaacattccggctttgatctttccgccgacaaactcgggcgctctgtcgtgggatgcgcagatgagatgccagttgtcggggcagctgttttctttgagattgtgctccgttgagatgagcgcggactcctgtatgtcgaacgcgtagacttttccgttttcccctacggttttcgagaggaatacagtgtcgtagccatttcccatcgtgaaatccaccgcggtgtcgccctcgtgaagatgcggcagaatgaatttcttttgcagtgataataaatctaccacagcttaacctcttgcaccgctcgcgtattcgtatgccaaatcaaacgccttcatgttgacctccagtgccttcgcggggacacaggcggctacagcggcgcggagaatgtcgtggtcaaagccgagcacacttgacgcaagtccgatgagagctacgttggacgcacgcacgtttccggcttcctcggcaatggactgtgcgtcgaatgcgcgaacgtcaactccgagcagcttcatgtcgggtattatgtcggtggggtattccgcagcgcccgtgatgaccggcatggggttaatctgctgagtagaggtaacaataactccgcctgttttaaggttcgggagccagcgcgcagcctcgagtagctcaaagctcaaaattacgtccgcgtctcctttgcagattacgggggagtaaacctcgtcgccgtaacggacgtaggttactaccgagccgccgcgctgagacataccgtgtacctcggaaaccttaacgtcaagtcccgactccatggcagcgcggccgagtatttttgaggcgagaagcgtaccctgaccgccgacgcccactatcattatgttcttgttcatatgtatcacctgttttactatataatcagagcgcgccgaatttgcacatctgtgagcagagtccgcagcctacgcacatcgtcttgtcgatcttcgccttcttgttttcaacggaaatgcacgggcagcctatcttcatgcacgacttgcagcctacgcactttgtctcgtcaaccgtgaacggaggattttttacggcagtcttcagaagagcgcagggacggcgtgcaatgataacggacgcgcagtcggctgaaacttcttccttgataactctctcaagctcggcgaggtttgcgggatctacaacacgaatgtgttcgcgggagataccgagggacgcgcagatatcctcaaggcagaggttcggagccttctcacccatgagagttttgccggtgagcgggttgtcctggtgtcccgtcatgccagtaatactgttgtcgaggattatgttagtcgtcttgccgccgttgtataccacgttcacaagccctgtcagaccgctgtgcatgaaggtggagtctccgataactgacacatacttgtcctcttctccgcgaaccttagccgtgccgtggagggatgagattgacgcgcccatgcagtaaacggagtcgatagcggaaaggggagcaaccgcgccgagagtgtagcagccgatgtcgccggagacgcgcagttttagcttagataaggtgtagaaaactccgcggtggggacatccggggcagagaaccggcggacggggcggtatgggagagccaagctccacgtaatccgtttcctcgccgagcagtctttcacgcaggagctgttcgctgtactcgtcgcagaggggaaggagagccttgcctatgacgttcacgccgagagccttgcagtgattttcgataacggggtcaagctcttcgatgacgtaaacggtgtcgtgcgcggcggcaaaatcacggatgagcttttcgggaaggggatttataagaccgagcttcaagtaatccgcgcgcttaccgaacgcttcctttgcgtagttgtagcagtttccggcagtgatgatacctacggacgcgccgttttgctccacacggttgagggaagtagtttcggcaaactcacggagagcggcgaggtgttcctcaactacgatgtggcgtttttttgcgtttccgggcatcatgacgtgctttgcggcgttcttttcgtatgggagaatgggaagctcgactctctctccctcttctacgggagaacgagagtggctgacgcgtgtggtgaggcggaagatgaagggcgtgtcgaacttttcggagaggtcgaacgcctgcatgacgaattcgcggcactcggcggagtttgcgggctctaccataggcagcttagcggcaatggcgtaatggcggctgtcctgctcgttctgggaagagtgcataccggggtcgtcagctacgccgataacaaagcctgcgcccacgcctgtgtaagcggtgacgaacatagggtcagccgcgacgttaagaccgacgtgcttcatgccgcagaaagctctgcctccgccgacagacgcaccgagagctgcttcaaaagcgaccttttcgttaggcgcccactcgctgtacatatccttatagagggcggtattttcggtaatctccgtactgggagttccgggataactggaaacaaagcgcacgccggcctcgtagataccgcgagcggtggcttcatttcccaacataagttttttcatggggtatactccttataaagctgcaataatactattgtattatatcacgaaagcgcgtgatttgcaagattgaatggaatttaatccttgctaccttagacgacgtgcgctttctgggagacttcacgtcttcgcaagaaagagcgcaagctaatttcttttcattagactacgagcgtattctaagagacttccctctgtaagattcacttaggttttaagtgagaaaaaaagaaaaaagacttacgtcttttgatttattaaatcgactgcggtcgaaggctgctcctacgcggagggcgc

SEQ ID NO: 4593 - DNA, 3866 bp, Unknown
  16S sequences of unknown bacteria
gcgggcccatgcctggatggccggcccgacgttgaagctggcgagcgagtgcagacgacgctcatacagctggatcttcttgttgtcgtatcgccagcggaacgtgatcttatggtcgggcaggttgcgcttggaccactcctccagcgaaatcgcctcgcgctcggcgagctcctcgcgcgcgatgtttgccggatcggcgtcgtcttgcgcgcctaccaggttgaacgggatcttgtcttcggtatcgctcatagggcgtgtgtctccttacaaagcgcggggccgcgcagaggtgcggccccggacatgctaaagggtatgcagtgcagattaatggcggaagtggcgatgcgccgtgaacaccatcgggatgcccgcctcgtcggcgcactcgatggacaggtcgtcgcggatggagccgccgggctggatgagcgccgtgcagccggcatcgcggatgacctcgagcgtatcggggaagggcaggaacgcgtcgcttgccacgaccgcgccttcggccttgttgcccgcctgcttgaccgcgatgcgcgcagaattgacgcggttgggctggccgccgccgatgccgacgggggcatgccccttcgtgagcacgatcgcgttggacttgatgcacttgcagcagcgccaggcaaacagcagctcgtcgagttgctcgtccgtcggctgcgccttggtcggcacggtgaaggtcgcagggtcttcggtcaccgcgtccgtggactggatgacgacgccgccttcgatgctgcggatgtcgtacgtgccgcccgcggggttgatgccgccggtcttgagaatgcgtgcgttcttcttctgcgcgaagatctcgagtgcttcgtcctcgtagtcaggagcgatgacgacctcgatgaactgcttgttttcctcgacgatctgacgcgccgtcgccgcctcgaccttgcagttgaacgccatgacgccaccgaaggcgctgacggaatcgcactcgaatgcacgctggtaggcgtcgagctgcgtgtccgcgacagcgatgccgcacggcgtgaggtgcttgatgatgacgcaggccggcttgtcggtgccaaactcgcgcaccgaagaccaggcagcgtccgtgtcgaggtagttgttgtagctcaggtccttctcgccctggaccttgacggcgttggcgagcgtgaacgcatctgccggatctgcggatttgcccggcgtcttgaggcggtagaacgcggcggactgatgcgggttctcgccgtagcgtagatgggcgcccttctcgagcatgatgcgcttgtcgtcggcgagcgcatcgtcgccttcgatctggttgtacatccaggtgtagatggcgttgtcgtagtagctcgtggtacggaagacctcgagagcaagcttcttgcgcgtctcgagcgtcgtggcaccgtcgttggcgcgcatctcgtcgaggatcgcgtcgtagctcgcggggtcggtcacgaccgtgaccgatgcgtggttcttggccgcagagcggagcatggaggggcctccgatgtcgatgtgctcgatcgcgtcttggtactcgacgcccggcctgttgatggtcgcctcgaaggcgtacaggttgacgacgaccatgtcgatcatgccgatgccgttgtcggcggcgtctttcatgtggctttcgaggtcgcggcgtgcgagcaggccgccgtggaccttggggtgcagcgtcttcacgcgcccgtccatcatctcggggaatcccgtgtagtcctcaatcggggtgacgggaatgccagcatcctcgagcaccttagccgttccgcccgtgctgatgatctccacgccaaactcgtcgacgagtgcgcgtgcaaaatcctcgattccgcttttatcggtaagcgagataatcgcacgcttgatcttctgatctgccatcgaagcccctttccgtaccacgtgaactagatacgcctgcattttctcacacggataaaaatagcgggccggcaaagagccgacccgccaaatcagcgtattttctttcgagtgccgcctactggtgcaccaaaggcgctacgcgttctcgatgatgtcgagcacgacgtcggtcgtgtactcgagcttgtcctcctcgatgatgtccatgctgtcggtggtccagtgccaacccgtgggcgcgacgccgtcgaagcccatgatggtcagcgcgcgcatgccggaaagcatggcgggcgtggcgtcggtgtcgcgccactcgagcttcgtgctcttcatgtccttgccgctgacctcgcgggcagccttcttgacaaggccgagcaggcggcggtcggcgcggcgcgacttgcccgtgccctcttgctcgacgaacttgatctcgcccgaaccgacggcctcgaggttgatgatcagggcgccgcgcagctcggaggcgtgcagctccatgaagttcttcatgccctggttgccggcaccagaagcgcccagcgccacgaaccagacttccttgtcgatgtcctcgctctcgttcatggcgatgacagagtcgcgaatctccgccgcacgggcgcgggccgcgtcgaaggccggcgagttggagcgacgctgcgcgtacgcggactcgccttcggggtagccgccttccgcatggccgccctcggggaagtcgatgacgttgtcgtcgccctcgtagtaggcgccgcccttccagccgaagtcgtcatcgtcgttccacttctcggcatcgccctcgccgaactcgttgggcttggagcccttcttgttcttcttgcccttgcggttgaacaggccgccgaccttgtccatggcgttgtggaaacgcgactcggggatgttgatctcgcccgtcgtgcccggggcgaggaagctgtcggcaaagtcgtcgctcgagggggtgtagccgtcggccggacggtagccgccccgggcgccgtcggaggatgcctgcgagctgaacgcgctgtcgtcgatgacgggcatctggccgctcagcgccgggaacgagcccgtaagcgcggggaacgaggagctgtttgccggagaggccgcataggcgtcgtaacccgcggagcctgctgcgggcatctggcccgagcgggacggatgcgcggcggcgtcttgcgtcgcgcgggcgtcccatgcctgcgtcttgggcgcaaatgggtcggcgtagtcggcgcccgcctgcggcgtgtcctcgtacgtggagctgacaggagcctgctggcgcatgccgtcgagcacgcgcgtggcgtccgcgtcgcgcggcgccgccttagtcggctggaactcctgcgtgatgtggcgggcggtcggctcgcggcggtcgggcttggatttgagctcgcgcttgggggccgcgggctcttcggcgacgtcagccaccgttggcgccggtgcctcgggctctgcctgaagcgctgcataatcgtcggggtttgccacgggcacgcgcgggtcgacatcggagccgaagctcgggatgctctcgatgcccgcacggcgctcagcgtcgcggcgctcctgctcttcgcgcgccgctccatcggagctgccgatgatcggaatgcgcgaggtcaggccgcggaacaggccggatttgggctcgggcttctcggcggcgggggcaaacgtgaacgcgccgctcagatcgggcgtgagctcgtcgagctcgtcgtcgggaatgtcgacggtgccctcgtcgtcttcgggctcctcgagctcgtcgatcgtctcgccaaagtcgacgatggcgtcagagctcgtgggctgctcgatcggcgtgacaacggggactgccggagcaggtgctgcctgctcgacgacgggagcctcttcggcggggttgg

SEQ ID NO: 4594 - DNA, 13519 bp, Unknown
  16S sequences of unknown bacteria
ttgcacaaggggggcttttctttgcctaggtggacacaacgggccctggttcagtgagttacacagtaaaaaagccgcccgtaatgggcggctttttgtgcgcttgcgttatgcttcgatgtattcgccgtactcgaaataccactggacggcgccggggtaatcctggatcaactgccgcatctgccggaaggcatcggcatccggggcctggcacatccactggcgggcatcttccccttcactctgggtgatcaggcagcggggggcgggggaggtgtcctgggaaaacagagtgatcaggtaccggccgtccccggtttccagccagatgccatcggactggccaaagggaacagcggccgggttatcgccatcctcccaggtgggtttcaggctttggaggaactgggtgaccgtctttgtgtcctccggggccagggggatcttgcccagacgctcgcctttgtctgcgtcccgctcatagcaggaggcattgaccagataatactccccatcctccggcgtggggacgctcctgtcctgctgccaccagcggtactgaacagcggtgacggctcccagcaccactactgtgagcagggcgaaaatgatccatttccgtttcatccgtttcatagggagtcctcctttctttttatgagtttagtatactataacccagccaaaccgtcaagcggagtgcctccggtccggtgtccggacggccaggcggtgctgccgcacccgatcatgcaactggccctggttctgttgcctagtgcgggagcacaggttgggtgtcccgacacgggaccaatcccccctgaccgcctgtggcagtctgtcccccctttgcacaaggggggcttttctttgcctaggtggacacaacgggccctggttcagttgctcagcgccgcagagcagtatggggccggagacactccgccaatccccccctgaccgcctgcggcggtctgtccccccctttgcacaaggggggcttttctttacctaggcaaacacaatctgcccagcgcgggagcgcagtatgccagcggaggcactccgctagatcatttcgaacagatccatctggttgcttttggggataccctccaaagccccggcggcggtgagggtttcgataacccccttggtcaccttgccgcagcggagaatcatctcctcagtggacatgaacctgccgtttttccgctcttccacaatatcccgggcggcggcctcccccagcccgggcagcgaagtcaggggcggcaccagggtattcccgcggatcaggaacttgttcacatcgctctcatagatatccagcttctggaatgtaaagccccggcggtaaaactcatgcaccacttccagcgtggtgagggtatcttcctcggcggcggtgcgcttgtccttcccttgcaattcccgggtcttttccatcaccagcccgtcaccgtggcacatgatggaggcgtcaaagccgctggcccggatgccgaaataggcgctgtaaaaggccatgggctgatgcaccttgaaccaggcaatgcggtaggccatcatcacataggccgccgcatgggcccgggggaacatatactggatcttcttgcaggactcaatgtaccagtcggcaatgccgtgctcccgcatcagatcctcccactccggtttcagccccttgccctttcgcacgctttccgaaatcttgaaggactgctggggctcgatgcccgtctggatcagataggtcatgatgtcgtcacgcaccgaaatcacatctttcagcgtggcgtcgccgctttcgatgtagtccttggcgttgttcagccacacattggtgccgtgggacaggccggaaatgcgcagcagttcgtcgaaggtgtggggctgggtgatctccagcataccccggacgaaccgggtgccaaactcgggaatggccacggccccggtctttccaaaggagccgtcgtcgtcgatcttgagggcatccagggaggtgaagatggacatggtgtccgggtcgtccagggggatctcccgggcgttgaccccggtcaggtcctccaaggcccttatcatggtgggatcttcgtgtcccagcatatcgaacttcaaaaggttctggtcgatggagtgataatcaaaatgagtggtgatgatgtcgctctgggggtcgtccgccggacgctgcaccgggcagaactcataaatgctccggtcgttgggcacgataatcagtccgccggggtgctggccggtggtgcgcttgatgccggtgcatcccaccaccaaccggttctcctcggccttccccggcatcagcccccgttcctcgttgtatttcttcacaaaaccataggccgtcttgctcttgacggtgccgatggttcccgcccggaacacatggtcctccccgaacatgcggatcagctcccggtgggcccgggactggtattcgctggagaagttcaggtcgatatccggggccttttccccgttgaagcccaggaaggtggcaaagggaatgttgaacccgtctttgatcaggggcgtgccgcactggggacagagcttgtccggcaggtccaccccgcagccgtaattggggtcacccgggaaaatggagtgcttgcaatgggggcagcggtaatgggccggcagggagttgacctcggtgatgccggtcaaaaaggccacaaagctggagcccacgctgccacgggagcccaccaggtagccgtcctccaaagacttggccaccagcttctgggcgatcaggtacatcacatcaaagccgttgttgatgatggggatcagctcggcgtccagccgctccttcaccaaaggcggcagcgggtcgccatacagctcgatggccttctggtttgccatctggctgatctcgtcggccgagccggggatcaccggcgggcatttgtcgtcaggcaccggtttgatgtcctcgcacagttcagcgatcttgttggggttttccaccaccacttcataggcccgcttctgccccagataggcaaattccttcagcatctcgtcggtggttttgaaatagagaggggcctgcttgtcggcgtcggaaaagcccatgcccgccatgaggatggcccggtactggctgtcctccggctccaggaagtgcacatccccggtggctaccaccggcttttgcagggcatcccccagcttcagcactgtgcggttgaagtcccgcagctgctcttcgtccttggccgtgccgttttccagcatgaaccggttgttgtcaatgggctggatctccaggaagtcatacaggctggcgatctccttcagctcgttccaggtcttgccctggacgatggcggaaaacagctcgccggcctcgcaggccgagcctaagatcagcccttcccggtactgcatgagtaaggtggccgggatgatgggatggcgtttgaaatatttcagatgggagaaggaaatgagctggtacaggttcttgagccctgtgagattcttcaccagaatgatcatatggtgggacctgcgggacagagggtcttgttccccgccccggcacacatccagggcgtggttgatctgatccacccgctccaccggggccttttcctcgatcaaagacaacaggtggttatagatcttggccagcacgccggtgtcgtccaaggcccggtggtggttgaaggaaagccctaagtcctcggccacaatgttcagcttgtgccgcttgagatggggcagcagcacccggcacatctccacggtgtcgatggagcaaaactcccgctcaatgccgaacttttcgcacccggcccggaggaaggacacatcaaacccggcgttgtgggcgcaaaggggcctgtccccggcaaaatccaggaaggcccgcagggcttcctcctgggagggggccccgtccaccatctcatcccggatgccggtgagctttgtgatctcatagggcaccggggatgtggggctgacataagtatgaaaagtctccttctcttccccgtctttcacgatgatggcggcgatctcgatgatctcgcagttgcgggggctgaggccggtggtctccaggtcgaagaccacggtctcccctcgcaaaggcgtgtcgcactggccctgcaccgcctggctttttgccaggtcacccacaaagtaggcctccacgccgtagatcaccttgatgtcctggcccttgccccgcagcttttcctgggcgtgcatggcatcggggaaggactgggccacgccgtggtcggtgatggcgatggccttgtggccccagcgggcggcggtctggatggcctgggccgtgctcgtcaggccgtccatggagctcatgcaggtgtggagatgcagctccacccgtttgttttccgccttgtcctggcgcagcttctttctggcctccaccaccgcctggggggaaatgaccacttcccgctcaaaggtactataattggccaccccctggaccatcacataggaacccaccttcactgcatccatcaaaagggcgcattcctcgtcgggcagcaccttgacgcaccgcaccgagccatggccgtcggtcatatcgaaggtataaatggtttttccccgattattcagcttcttttcctcggcgaaaaagacctccccttccacggccaccttgccgctgtccacattgacctcgtccatatggatgatgggccgctgggccggtttgccgtaaagcaccttggcatcggagtttttgggccggaaaatcaccccttccggctttttccgctccatgtaccgcttttccggggcgggcttcttgggggccgggggtttctgggcggccggtgcacaccggctctgctccgcaagggccttttgcaaaagggccttctgctgcttttcaaaatcctggcaatgggccgggaaatccttgccctcccgcacttccaccggggaggaaaggcccagttcccgctgcaagaagagctgcaacggctcccgcagctcctgggcccggggaagccactgctccggggcgtcgatgaccaaagcccccttctcctcctggaagcggaggcagtccccggcggccgccatggagggatagcgggcccgcagccggtggcggcagtaatccaccgccgcctgatccagctcatggagctgatagcgcacctggagatgggcttttttcaggccataagccctgcggatgcaagtttccccggcctggagggagctttcttccagcaagtggggggccagcagggacacttccagggtgttctccttccggtttgcctcgatgccctggacctgggccccggccagggggcccccttcaaaatcgcatttgccgaagagctgctgtaaggtggcgctcatatctgttcaccggtcaggcgactgacttccttggccagggcgtcggcgatctcatgggccgggactttatagaggatctcccctttggaaaagagcagcccttcccctttgccgcaggccacccccagatcggcctggcgggcctcgccagggccgttgacggcgcagcccatcaccgccacggtgatgcggcttttcagcccggacaggcgctgctccacctcttcggcgatggggatcagatccacctgggtgcggccgcaggtggggcaggacaccaaggtggccccttcctggttcaatcccagggctttgagaatgtctttggcggcgtagacctcccgcaccgggtcggcagtgagggacacccgcagggtgtcgccgatgccgtccagcagcagcgccccgaaggccgccgccgatttcagggtgcccatataccgggtgcccgcttcggtgacccccagatgaaggggataatcggtcttttccgccatcagccggtaggcggcaatgttggttttcacatcggaggatttgagggaaatgcaaatgtcgtcaaaatcccaccggtggagcttttccacatgggacatggcgctctccaccagagcttccgccgtgggagcgccgtatttccggagaatgtccttttccaaactgccgccgttgacgccgatgcggatggggataccctgcttgcggcaggcccgcaccacttcccccaccttctcatcggagccgatgttgcccgggttgatgcgcactttgtccgccccttcctcggcggcccagatggcggccttgtagtcaaagtggatgtcggccaccaggggcagcggagaatcccggcggatgcgcccgaaggcccgggcggccttttcatcgggcacggtgagccgggccacatggcacccggcctctttcagccggtgaagctggcagagggtggcttccacatcggtggttttggtgttggccatggattgaatgctgaggggggcaccgcccccaatggccaccccccccaccatgatctgttttgtttttctttccatagtctttaccccccgatcagacgcacgatgtcgttataggtgacgaaaatgaacaggccgaagataagggccagcccggccagctgcacggccccttcgaacttgggcggcaccgggcggcggatgatggcctcgatgagcaggaacaaaatcttaccgccatccagcccgggaatgggcagcaggttcataatggacaggttgatggacaggaaggccacgaaataccacatatccagcgccgaggtcttggcccggttgctgatctcactggcgatgcccacggtgcccatcacatcgtccttctgaacctggccccggaagatctgcttgaggccctcggtcaccgactgcatgaagctgccggcgttattcaggctgtaccggagcttcgcgcccacggtggccttttcggtgacgaagttcatgccatagcgcaggctggtgccgccctgtgagtcggaatactcctgcttggtgagctccacatctgaaagctccaccttttccccatcccgccgaagggtgatgtcatagggctccccggctcccagttccagagcggtcatcacatccccatagaggaagatgtggaagtcattgatcttcaccaggcggtcgccctcctggatgccgttttcgccccctgcggggaagttttcttccagggatgccacctgaggggtgggcagggcctgggccggccacagggtgatgacgatgagcaaaaggcctgtgaggaagttcatcacagagcccgctgccgaaatggcaaaccggcggggcagactggccgcctgaaaagagccggtctggtcctccacttcattgccctcttcgtcaaactcccctttcatcacaacgcttccgcccagaggcagaagccggatggcataaagggtgcctttccactcctttttcacgatggccgggccgaaaccgatggaaaaccggtaaacggtgaccccggagagcttggcggccacaaagtgccccagctcatggacaaacacgatcaaaccaaataccaaaaccgcgatgagaatggacaaaaaatatcacctgttctttattatagttcgttatagtaataggcagcgtgacgctgcacccatactgcgctcccgcgcccgatcatgcaaccggactttcattcaactaccgggtgcgggagcaccgcagccccccttgtgcaaaggggggacagcatggctctgccatgcaggggggattgtagagccgggtaaatgattcagcccggttctgttgcccggtgcagcagcatcacttggaagcgaggacactgagtcaatccctcagtcggccttcgccgacagctccctttgcacaagggagccttctttgctgccctgcaccggatcgaccttcgttctatggcttagcgcggcagcgcagtatgggagcccaggcactgggcgcgaacgatgcggtcgatttccagaatttcttcaatcgttggattttcccggaagggctgatcccgcagggcctgggcgcacatctcataaatatccaaaaacccgatcttgccttccaggaagagcgccaccgccacttcgttggccccgttgatgaccgctccccggtctcccccctggcggatggcctgctcgcacaagctgagacaggggaaattctcccggtcgggcttctggaaggtcagggacccaatggctgtcaagtccaggggctttatcgccccctcctgccgctggggccaggtaagggccagctgaatgggcaggcgcatatcgggctcggacagctgggccatgacgcagccgtctctgaactccaccgccgaatggagaatgctctcccggtgcaccagcacctccacctgctccggcgcaaggccgaagagccacaccgcttccatcacctcaaagcccttgttcatcatggtggccgagtccacggtgatcttcttccccatgctccagttggggtggcgcagggcctccgccgccgtcattccccgcagctcctcccggcttttgccgaaaaagggcccgccggatgcggtgagcagcacccgccgcacttcctccaggggtctatttcccatggactggaaaatagccgagtgctcgctgtccaccggcagaatgggaacgcctttcttttgggccagctccatcacccgggcgccgccgcacaccagggactccttgttggccagggccagggtgtgccccgcttccagagccgccaccgtgggggaaagccctgccactcccaccagggcgttgagcaccatgtcgcactcttccagggaagccgcttccaaaagcccttcttccccgtaggaaacccgcacatcggtgtccgccagacggcctttcagctcccaggccgccttctcctcccccagcaccgccaggcgaggccggaaccggcgggcctgctcttccagcagccgggcgtttttcccggcggtgagggcggtgacggcatactgtttttcatcccggctcaccacatccagggcctgggtgccgatggagccggtggaacccaacagagcaatgcgtttcatagcggttttctccttttgttaaatggcgctggtgaaatggagcagaatttcaaacaaaggcgcagtaaaaatgacgctgtcgaaccggtccagcacgccgccatggccgggcataatgttgccatagtccttgatgccggtctttctcttgaccagggacaatgccagatcccccagcattccggccagactgcccaccactccggcggcactgagaagcaggtagttgggctccacgcccagcttgtttccggcgaaatagccgaagatgcaaagaccggcaacggcgccgatgacgccgcccacggccccttccaccgtctttttggggctgacctgagggatcagcttgtgcttgccgaagagcatgccgaacaccagagccaggctgtcgctgcaccaggcggccaggaagggcaaaagcacatacaccttgccgttttcatgctgaagcaggatgcgcatgacgccgctgagcaggaagggaatggtaatggcccccagataggcatgggcgatctgctctgcggtgatgcgctggggatggagaatggcccacaggaacaccagaagggtgaacacatagagcaggggcaggatgtagtacatatcgtagttgctggcggcgggcaccaaaaaggcggcgatgcagcaaatgggcagcagcggactgcctttcaaaaggccggtgttgtgcaaaaactcataggccgccagggcgcaaagcaggctgaaggccagcagcgtcacccattggggcgcccaatagaccacggcaataaacagcaaaatgcccaccagggcggaaatgacccgtactttcatcgggaaagacccccatatcttctgtttctcttctgaaattctgcgatggctttgtagatttcctctctgccgaaatcgggccagagggtatcggtgaagtaaaattcgctgtatgcgcactcccaaagcaggaagttggaaatgcgcatttccccaccgggccgcaccagcagatcggggggcggcacatcatggcagtacatccgcccttccagttctttttccccgatgtcttcgggggaaagtctgccctccaggcagtcctgggccagggcccgggcggcccggaggatctcatcccggccaccgtaattcaggcacacatggacctgcatgccggtgcactgtttggaaagctcgtcggtctgatggatgagctttcgcagcttgggcgaaagcgggctcaggtccccccagaaatccagctggatgttgttttccaccagttcccggatggaacgccggaggtatttttccagaaggcccatgatggccgagacctcttccaggggccgcttccagttttcggtggaaaaggcgtagaccgtcatgtgccggacgcccagctccgccaaaatctctgcggccttgtggaaactttcgcttcccgccgagtgtccggcggtacggggcaggccccgtttctgggcccaccggccgttgccgtccatgacgaaggcaatgtgccggggtatgttttctttgtcaaagggcaatggccccgtttccttgttcatcgtatccacctattgttgattctttgcttcctgcgttccgttgcttcgtgctgcaaaaattccccgggaaccggggaattttgttttgcatcgtagccttttccatggcgcttggccgcccaggcaccgggtcaatcccaccggcggcattcgccgccacctccctttgcacaagggaggcttctttgccccattgcaccgggtcagccttttctatggcgcttggctcctaccgggccctgccgggaggcgcgaaaagggtcggggaagtccggtggccggacagccaagcggtgcttccgcacccgatcacgcaaccggctttcgttcaactacccagcgcggcagcgcaggttgggtccagcgtcacgctggcccctatatctccaggagttccttttcctttttggcgctttcggcttccacttccttgatgaacttgtcggtcaggttctggatgtccttctcggcgatcttgtaatcgtcctcggtcatctcggaagccttcttctgggccttgaaatcatccatggcatcccggcgcacattgcggatggccaccttggcctcctcggcgtacttgctcacctgctttgtcagctctttgcggcgctcctcggtgaggggcgggaaagtcagccggatggccttgccgtcgttctggggggtgatgccgatgtcggaagccagaatggccttctcaatgcccttgagcaccgaggagtcatagggctggatcagcaagctgtggggatcgggggacgagatgttccccacctgctgcaccggagtggcaacgccgtaataatccacggtcactttgtccagcacagcggcgctgggccggcctgtacggatggtggtaaattcgtgcttgagcacatccactgtcttctgcattttgtcctgatacgcttgatactgattactcattttttattcctcccctatcaccgagccaatatgctcgccttttaacactttcaaaatattttcagggtccttgatggcaaaaaccaacaccgggatgttgttgtccatggaaagggatgtggcggtggagtccatcacctggagccggtttttcagcacatcggtgtacttgatggattcgatcttcttggcctgcggattcttggccgggtcagagtcatagatgccgtcgatgttcttggccagcaatatggcatcggcattgatctcggcggcccggagagccgctgcggtatcggtggagaagaagggattgcctgtgccgcaggcaaagataaccactcttcccttttccagatgccggatggctttcagccggatatagggctcggcgatcttgttcatatcgatgccggtctgcacccgcaccacgacgccctgcttttccagcacatcggcaaaggccagggcattgatggtggtggccagcatacccatgtggtcggcccgggtgcgttccatgtccttgccgtccttgaggccccgccagaagttgccgccgcctaccacgatgccgatctgcacgcccatatcgacgcactcccgcaccactttggcgatggattccagcacatcgaagttgatcccccgatggccttcggcatccccggccagggcttcgccgctgaccttgagaagcacgcgtttgtatttcagtgtttccatactatcccccgcttttgattttcttctattttaaactatttccgtcattttgaaaagccgttttcccgttatttttggtttatttacaatcgcccctgtttcccccgcttccataggtatgttttctctcccttgtctcatgctcatgctttgtttgattgcccagcgcagtatgggagcccaggcactgggttgaagaatccttccttttatggtatgatgacggagaaaacatcacaaagggaggtttgaccccatggagtttattcccattgacaaagagacctggccccggcgggaatatttcgaccactatttttccgctgtgccctgtttttacagcatgaccaccgccctggacatcacccgtctgcgccaggaaaaggtgcggctgtatccggccctgctctatctcctcacccagacggtgaaccggcacatccccttccgcaccgccatccgcaacggccagctgggctattttgaccgtatggaacccagctacaccgttttttccaaagagaccgagaccttttcctccatctggactttgtgccagggggattacgccaccttcctggccgattatgagcgggatgtggcggcctatgccgcttcggggaagttcagccccaagcccaatcccccggaaaacctgttcaatgtgtccatgatcccctgggcccggtttgagggcttccacctggatctgccccggggcggtgagtatctgctgcccatcttcaccctgggccagttctatcagcaaggagaccgctggttcatccccctggcctcccaggtgcaccacgccgtctgtgacgggttccatctgtgccgcttcctggatgacctccaggcccagtgcctgggctcccatactgcgctgccgcgctaggcagttgaatgaaagccggttgtgtccactcaggcaaagagagggatggcagcggggccaccccgccgctcccgcgctaggcaacagaacgaaagccggttgtgtccacacaggcaaagaaggcgcccttgtacaaagggagctgtcggcgaacgccgactgagggattggcggagtgcctccgctggcatactgtgctgccgcaccggacaacagagcgaaggctggtggctgacccggcaacgataaccacacccggaatccggtatcaacaatatggctgcgtgccgtcaatcccccctgcatggctttgccatgctgtcccccctttgcacaaggggggctgcggcgagccgccgct

SEQ ID NO: 4595 - DNA, 10494 bp, Unknown
  16S sequences of unknown bacteria
atttccgagcattttttcgatcatcggaagcatcgtctcgctgtgcgtgagggtcccgcagacggtcgatacggcgcgcatccgctccccgtccgcgtctttttcgagcaccgcgcaggaggcggtcttcgcggtcgtgtcgagtgctaaaacaagcatttcatctttcctcgtaatacaccgaaatatccctcgaattctccccggtcttggtgattatgaccgagaaataccgcttcgggagtctgtccgcgatgttctccgaccattcggtcaggatcattccgcgcccgagatacccgtcgaagtcaatcgagtcgaggtcgtcgtcgctgacgatgcggtacatatcgaagtgaaacaccggcattgtaaattcgttctgaacatttggtaaatattcattgactatagcgtaagtcgggctggtgacccgcgcccccggagcgagcaccgacgccgcgccgcgcgtgaaagcggtcttccccgcgccgaggtcgccgaacatcgcgatgaaatcgacgcccattcgctttgcggtcgccgcggtcttggctccggcgagctcggtctcctccggcgaatcgctctttatttcaagtattttcgtctgcatcagaacagccccgtgatctttccgctgtcgtcgacgtcaatgccgaccgcggcgggcttcttaggcagacccggcatcgtgagcaccgaaccggtgagaacgacgatgaatcccgcgcccgcggacagcctgacctctctgacggtcagcgtgaagccggtcggtctcccgagcttcttcgggtcgtcggacagcgagtactgcgtcttcgccatgcagaccgggaagcgcgaatattccggatcgagtgccgatatgtcgcggatggctttctccgcgttcggctcgaacacgacgttttccgcgccgtagatctccttcgcgatggtggttatcttgtccttgatcgacatatcgtccggatagagcactttgaacttgtcctcggcgttctcgtcacaggcgtcaattaccgccttcgcgagctcgattccgccttccccgcccttcgcgaagacctcggaaagggcgattttagcgccgcgcttctcgcagagctccttcacgtaggcgagctccgcgtcggtgtcggttccgaagcggttcagcgcgacgacgaccggcagaccgaatttcgcgaggttgtcgatgtgcgcctcgaggttgaccgcgcccttcttcagcgcgtcgaggttttcttcagcgagttccgtcttcggcacgccgccgttgtatttgagcgcgcggatagtcgcgacgagcacgacggcgctcggcttcagccccgccttgcggcacttgatgtcgaagaatttctcggctccgaggtcggctccgaaccctgcctctgtgaccgtgtaatcggcgagtttgagagcgagcttcgtcgcgcgcaccgagttgcacccgtgcgcgatattcgcgaaaggaccgccgtgaacgatagcgggcgtgtgctcgagcgtctgaacgaggttcggcttgagcgcgtccttgaggagcgccgccatcgacccctgaacgttcaggtcgcgcgcgaagacgggctttccgtcatatgtgtacgcgacaagtatcgagccgagccgcttcttgaggtcggcgagcgagtccgcgaggcagaggatagccatggtctcggtcgcgacggtgatctggaagtgctcttccctgacgacgcccgaaagcgggccgcccatgccgatgacgcagttgcggagcgctctgtcgttcgtgtcggtgcatctgagggtgaggattcgtctcgggtcgattccgagctcgttgccctgctggaggtggttgtcgatgaccgcggagagcaggttgttcgcggctgttatcgcgtggaaatcgccggtgaaatggagatttatgtcctccatcggaacgacctgagcgtatccgccgcctgccgcgccgcctttgacgccgaagacaggtccgagcgacggctctctgagcgcgattatcgccttcttgccgagcttcgagagcgccatgccgagaccgacggacgtcgtggttttgccctcgcccgcaggggtcgggtttatcgcggtgacgaggacgagcttgccgtccggcttttcgccgcattttccgatgaactcctcggtgactttcgccttgtatttgccgtagagctcgaggtcgtcctcgccgatgccgatttttccggcgatttcggttatcgggagcattttcgcttcctgcgcgatttctatatccggtttcatgattttttcctttccgactcgcgtcatgctgaattcgtatactattatatatattataccatagcttttcgcgcgggtcaatagcccgcgcaattttttgtgtaattttcgcctgcgcaattttaaggaaatggtattgcaattttcatataaatgtgatatactatttttatggcaggaagcagcggtatcctgtgaaaacatatataatttaaggaaggaaactccagaaaatgaagaaaaagaatataatcgcggcggcgctcgtctccgccctcgcgctgacgtccttctccgtgttcgtcctcggcgacgacgcggcgtatgacgcgtcgtccgacccgctcgtctcactctcgtacgtcgagaaaataacggcggagcagaacgcgaagatagccgacctgacgacccgtctctccgccctcgagaccgagaacgcgtcgctgaagacgacggtcgcgtcccagaacacgacaatagacgagctcagaaaaacagtcagcgacgtcaccggcggctacgaggtcgtgaacctgaaaaagggcgacaagctcttcgccgacacggtctgcgagctgatcctgcgctccggaacggcgtcggtcatagctcccggcgcgaacggaatcgctgatctgaccgcagccgccgaccttgcaaattccgacatcgtcccggcgcagcacagcctgatgatcccgcgcggcggcgacggacgcggcattctcgtcaccagcgacgaaatctacataatggtcaggggagaatatcaccttggagaataagcacaagagtaagaccgcgaagcgcgacagaatgcgccgcatcctctgcctgatactcgcgataatgatggtcggcggcacggcggtgacgcttgtctacaacctgctcctgacgcgtgtttacgccgcggatgccgatgatacggcggttttatccgcgtcggcgagcgacacgaagcgcgtccgcgtcgggctcatgtacggagaaaacgtgacggtaggcttcgagacggacgccgcgaacggcttcgggattgagacggtggaccgctctgtccccgatctcacgtcgcgtgaaatatgggagttatcacttacaaaggtagccgccgtggtcgacggaaaccttgcgaaaaccgacatgacctaccgcgtcgcgtccggaaacgacacgataaaaataggcggctaccacgtcgggataggctcgggtatgacccgggaaacctgcgaaacgatgctcgccgcgctcgacgagacgctcgcgtcgctcggatacgacgtcttcccgttctacggcgacagcggattttctctgcgcgccgggaatttcgcgacggcttccgacgcgcaggcggcggcgtcgaagatttcttcggtcatcgccgacctcgacatttatacagtttctccgacaaagaccggcgtgtcgctcgtcaacccgtacaccgacgagatattgttcgagtatgacgcgtccgacgtgacggcgctcggtctgaccgcgcgtccctccgccgacggcacgaagaattacctcgtcacccccgcgaagaagcagtacgacggcatcttcatgttccgccgcgagaatatcgcgaccgacccgaacgccggctacaccgacggcgtctcgctgacgaacgtgatggagctcggcgactacatcgagggcgtccttccgtatgaaatatcgtcctcatggccgctcgagtcgcagaaggcgttcgcgatcgtcgtccgctcctacacgatgtcgtcgctgaaccgccacaaggcgtacggcttcgacctctgcaactcgacgcattgtcaggtctatcagggtcgcgcgcgggtgaccgacgtcgtcgagcaggcggtccgcgagacctccggtcaggtaatgatatatgacggaaaaatagttcaggcgttctacagcgccgtctcgggcggcgtcacggtctccgcgaaggacgcgtggggctccgaggtgccgtacctgcacgcgatcgagaccccgtgggagatctacacgaaccactcctacggcacgtggcagaccgaggtcagcccgtcggagctcgccgattacctgcgctccaaaggttattcgatcagcggaaacgtcgcgtcgataacgatagatcgtctcgccgacaattctacatacatagcagagctgacaataaccggcacgtccggcggctcggtcacgataaagcgcaccgattcagtccgctccgccctcgcgaagtacgtgaagagcgcgaatttcgtcgtcggcaaaggcaaggtcgacgccgacataacgacctttgacaccgagtcgatgacctcgacacctgtaataaccgcgtccggcacgacttcgcacgaaaattctacaggcgtcacagtcatgaccgcgtccggaaaggcgtccctccccgacatgaacagcgcgaccgccgtcacgtccgacggcacgaagcagctcggcaaggtgacgtcgacgacggtccgccagactgtttacgccgagaacagcggcaacttcatcttcgtcggcaagggctacggccacggcgtcgggctctcgcagatcgggcttcgtgacctcgcaaagcagggcgtcgccgcgaaggatatgctgaaaatgtacttccccggaatcgtgatcgacgatctcgcaacggtaataaaataatttcaagtatccaattaatacaatttgtataatttgcacaaagctctgtaggggcgaccattggtcgcccgctcccctgtttacgtgactataaaggaggataaccatgcctgtattacccgaaaattcccgcctcgcgttcataggcgacagtctgacccacgcaaacaactatccctcgcgtgtcatcgactattaccggaagaatttccacaatctgcacgtgactttccgcaactgcggcatctccggcgcgtcagtcccgacgatacttcgctttttcgaggaggacatcctgccgttccacccgacgcacgcgacgataatgctcggcgtgaacgactcctggcgcgaccttctcggctcgccgaggaccgaggagcgcgacaaccgtctcgctttcgccttccgcgagtacaaaaagaacctcgagaaattgtgcaatctgctgaaagatcacggcgtcaaagtgattctctgcacaccctgcccgttcgcggagcacgccgtcaaaggcgcgtacaagggcggtcacgcgctgatgctctattacgccgagtacgtcagaaagctcgcgaagaagctgaacctcgacctgatcgacgtccacgcgcggatctccgagctgtacctcgacgaaaagctcttcggcgccgacccggttcacccgatagacgccggttacgcgcgcatcgccgagtgcttcctcggatatttcggcgcggagcttcccgacatcgtgatcggaaaacagccggaaccgatctcgccggacctcgacaaatggcgcaaagccgcagaccgtcagcgaaacatcctcgcgaccgagtcgatgctctgtgacccgtcggcgaagacgaccgaagaaaagctcgatttcatgcgtaaatacgtcgaagaaaagcgctacatcggcacgcacgccgagagctatttcgacctcctctcgcacacctacctgaccgataagccgcgccagagcgaaattctccgtgaaattgacgaaagcatggcgaagcttacggagtaacgtattactacttcattctgttagcaagcaatatagtttacagccatgttaaaattgccgccgtccccttgaattcacggtaaaaatgtggtataataggggtacacggaaatttccggggaaatttccggcaaaatgacatgacctgaaaggatatataaatatggaagaaaaactcgacccgaagaccctcctctacaaaaacgagaacgctttcgcgcgcgaagaccgcgaagagctgaagaaatccgcagccgactactgcgtcggttataaaaagttcctcgacaacggcaaaaccgagcgcgaagtcgtccgcgagaccatcccgatgctcgaagcgaatggatacgtcgcctacgaaataggcgacaaaatcgtccgcggcggcaaatactacctgaacaaccgcggcaagtcgatcataatcttcaaggtcggcaccgagccgatcgaaaacggcgtccgcatcgccgccgcgcacatcgactccccgcgcgtcgacttcaagccctgccccgtcttcgaggaagccgaaatgtgcttcttcaagacccactactacggcggcatcaagaaataccagtgggtagccaccccgctctccctccacggcgtaatctgcacgaagaacggcgacgtcaacgtaacctatggtgaaaatgacgaagaaccctgcttctacatcaacgacctcccgccgcacctcgcgcagctccagtacgaaaaatccgccgcgaaaataatcgaaggcgaacagctgaacgtcctcgccggaaccgaaccctacccctccgacgaaaaactctccgacgccgtaaaactgaacgtcctcgccgccctcaatgaaaaatacggctgcaccgaagcggacctcataaactccgaactctgcgccgtccccgccgcgaaagcccgcgacataggcttcgaccgctcgctcataggctcctacggtcacgacgaccgcgtctgcgcctaccccgcggtaaccgccatcctcgacagcgaagattccgaacacaccctcatgaccatcctcgccgacaaagaagaaatcggcagcgaaggcgtcagcggtatgcaatgccagatcttcgaagacgtcctcgaagaaatcgcccttgcccttaacggcaacccacgcgccgtccgcgcccactccaaatgcctctccgccgacgtcaacgtcgcctacgaccccaacttccccgaagtcttcgaaaaacgcaactccgccatgctcggtcacggcgtagtcctctccaaatacaccggctcccgcggcaaatccggcacctccgacgcctccgccgaattcgtctccttcgtgacaaactccttcgaccacgacaacgtagcatggcaaatggctgaactcggcaaagtcgacctcggcggcggcggaaccgtcgcaaaattcatcgccaaagccaacatcgacacagtagacctcggcgtcccggtaatctccatgcacgccccctacgaagtcgtctccaaaatcgacgtttatatgacccacaaggctataaaggcgttctatagataagtaaagcggggaaaccctctttgaaaagagggtttccccgcaccccttcctagaaactttatacaactaaaggagtaaagcaatgaacgaaatactcaaaaaaatcggattatacggtatcgtgccggtcgtcaaaatcgacgacgtcgacaaagcagtgccgctcgcaaaggccctctgcgacggcggacttccggtcgccgaaatcacattcagaaccaaatgcgccgccgaagcaatcaaacgcatcaccaccgaattcccgcagatgctcgtaggcgccggcaccgtcctcacccccgatcaggcagacgaagccacagccgcgggcgccagattcatagtcagccccggtctcaaccccaaagtagtagcccactgccagaaaatcggagtcccaataacccccggctgctccaaccccagcgacatcgaagccgccctcgagctcggtctcgacgtagtgaaattcttccccgccgaagcggcaggcggactccccatgatcaaagccatgtccgccccctacggcaacctcaaattcatgcccaccggcggcctgaacgaatccaacatcctcgactacttaaaattcaacaaaatcctcgcctgcggcggcagctacatggtctcaagcgacctcataaactccggcaacttcgccaaaatcgaagaactcacccgccgtgccgtaatgcagatgcacggtttcgaactgcgccacgtaggaatcaacttcgacagcaaagacgaagccctgaaaaccctgaacctcctgaccaaaatgttcggctacacccagaccctgaacgaaggcggcgccttcgccggcaccgacatcgaactcatgtacacccacttcaaaggcacgctcggacacatagcaatcggcgtgaacttcctcgaccgcgccgtattctatttccagaacatgggaatcgaattcgacccggattttctcgcgaaattcgagcgcggcgaaaccaaagccgtatacttcaaggacgaaatcggcggcttcgcgttccatattgtgcagaaataagaaaaaatgggggaaacgcttttgaaaaagtgtttcccccatgctaaataattcaaattaattttacatataatctatataacatcagtgagttttgttgtataataaatatggagaaatactataaggaggttttcaatgagtcaacgtgaaatggcagctcgtctgctcgaaaatgttccgcagtggaagctcggatatgtcatcgcatatattcagggacttatcgctgatgatgatgcagatgatgcattctgtgaaaagcttcttgaagactatgagaatgatccagacaaaggtcccttcgtctctttcgatgaagtcgcaaaagagtgcgggttaaatccaaatgacttataacatcgtatttgacaaacgtgcggaaaagttcttattaacacagcccaaaaagcaacaggaaaggctgctcagtgcgataatgaatctcccatatacaggagatataaaaatgctgcgtggatattcaaaaaagtctttccgcttgcgtgttggttcttatcgtataatttatcaggtaaaagatgagatactgactatagttgttattaacataaacacacgcggtgacatttacaaatagcaaaaagggacagcaccaactgtccctttttctcattcctcacaagaataaatctcccgatacctctccgccgcgtccagcaccttccgcacataattccgcgtctcggcaatcggtatcttctcagttataagtcgtccgtcactatcggtcatccccggctcctgaagccaattccggacccgccctatcccggcattatacgccgcgagcgcctcctcgtcaaacccgaactgcccgcgcagatacgccagaaaatagcatccgcgccggatatttgtctccgggtcaaaaagctcatccgtaacctccgcgtcctcgagccagccgacatccccctgcatccgcgaaatccaatcattcgtatcgtcagtgatctgcataagacccttagcccccgcagacgacaaagcatccgcgcggaacgaactctcagtcaatatcaccgcgaaaacaagctctacaggcagcgaattctcaaacgcgtacttctcgacaagctccgaatactccctcgggtacatccgccgctcctgctccggtcgtatcttaaaattccaataaagcgccgccgacaaaatgaaaaccgccgcgagcagcacgcaaacgccgcccgccagacgcctaccgcgcgatcttatcataatttatcttcttaagaatattctcagtctgcccctcaagcgaatcaatcccgccgttattatagacaacgaaatcgcaatgctcagtgaaaaattcgtcgctatgctgagaatcgatcctcttctcagccgccgtccggtcaatcccgtcccgcgcaactatccggcggatccgaacctcacggtccgcgatcaccccgataataaaatcgcaatgcttatcaaaccccgactcaaacaactgcggcgcgtccacgacagccagcgtatcccccgccttagcacgcccctcaagccaagcgttaatctccgcgataatatgtttatgcgtaatcctgttcagcgccgtcaacttatccttccgcgcctccggatccggctcggcaaacacaatcctcgccaacccatgccggtcaagccgcccgtcctcacgaagtatcacctcgccgaaccgctccacaagctcctcaagacaccgactccccggcgccgtaacaagccgcgaaaccttatccgtatcaagcacccgtatcccataactcatcagacaaagcgacaactcgcccttccccgcgccggaaccgccggtcagacctataactcgcattttatcgttaatcatatgtaattttacgcggggaaaccctc

SEQ ID NO: 4596 - DNA, 7408 bp, Unknown
  16S sequences of unknown bacteria
ttctccgccgccgaagtgctttcggtgggcccccaccacatggaaaaaagcttgaccgcctttaagggatttcccgccgccttcatataatcggcactttgccagtctccccccgtgttttcgagagggtcggaggttcttttaaaaacccgatatgccgtagcgacaggattcagatagagctcgttcggagatttatcggtcagcccgctctttaaaatgcttgcctcggaggccgaggaggatgaatatgaccagcaaaggttgctgtctccctgatccctgacgggggttatgattccgacgcttcgtccgtcatatttttcgagctttgcaatttcctcaaaagcgccctccgactgctcggccgacgggaaaagagcggccgaaaaaagacagctcaaagccaccgacagagacagcaaaaggcacaaaggctttttgaacatatccgtcacctctctcaaattcaaaacgtccgattaaacggttgctttgttcacatatttcacttgttattttaacataccttttgacaaaaaacaaccgcctcaaagcttcgccgattaaaacgcccgccgcccgagacggaaaatttaattattcttgaaaaatgccacagccacggctccggggccggcatgagtccccaccacgctgccgatttgggaatatctcacacggtcaagtctttcctgccaaagccatttgctgtcctcgatatatttaagcagcaaagcatcggaaatgccggtatatccgagcataaccggccttgaaaaatctataccgccggatttttcaatttccctgacaagcaggttattcccctgttttgagcctctcgccttgccaagcacacctataaccccgtcgttaaggcatataaccggctttatgtttaaaaccgtgcccgccacggcggcggttttggaaatgcgtccgccctttttaagatattcaagggtgtccacaagggcgaccacagtaattttttccttttccctgtcaagccgatctgcaatttcctttgccgaaaggcctttttgcgaaagggaaagagcaagctcgacaataattccctgccccaccgttgtcgttccgctgtccacaacaaaaattcccggaaaatcctctgctgcgatacaggcactttgatatgttcccgaaagctttgaggaaatggttatgacaacggcctgttcaccgttttttaaggtacggaaaagctttttaaacgcctcgggagagggctggctcgttgtgggaagctcgtcgctttcgataagcatttcgtaaaatgtcttgcggtcgatgtccactccgtcgacatattccctatctgaaaaccgcacggtcaacggcaccgtttccaccgaattttgaacctcttccgccatatctgccgacgaatcgacaattatttttacactcattttttacatcctttcatcggccgccgctttttcaagcttgtcgctgaccttattcagaaagcggtaaaaaacctcccgctctccctcgcttaaatcttcgccgacgttttccacgaccgaatcgattttaagggctattttgccggcagcctcccgccccttttcggtcagttccatgggggaattatatcgcttttttccctgctctcggcagcggacaaatcccttttgctcaagaaatccgagacttctcgagacggtggccttgtcctcctcgcatttttcgcaaagctcggtagcggtcagcccgccgaaaagatacaaaaaataaagacaggaaacgtgagggcttttgagcccgtattccctcatttcgcggtttttaattctttttatgttacggtttatcttggtcatcagcaccgtaaaggtttcgaattttccttccgttttaagccctcccgacttgttgaagtttcaacaagtttggattttaacacatctaagccaaaaagtcaagagtcaaaaaaggctgcggcaccgactccctattcaaagggcgcgggcgccgtcagcgtgagtctttcctccgaaaaggggcggcaaaactcaagccgctcgcaatgcaaaagaaaatgctttccctcttcctcttttccgtaaagaaaatcatatttcagcgggcagccgacgcttgcaagatgcaccctgatttggtgggttcgcccggtcaacgggaaaaggcggagcagcgcgccgttttcgtccgccctcaccgtttcataggccgtaacggcgggctttcctgtcggcgacacctctcttttgataacgctgccgcaaaccctcgctatgggagcgtttatctccccccgcggcgggcagggagccttttcgcaaagcccgagatatgtctttttgacctctcccttttcaaatgccctgcaaaggcgaaaggcggcgtcggcgtttttggccacgaccacaatgcctgaggtatatttatcaaggcggctgacggcgcgaaaaacaaaggatgtgtttttataataattcatgaccgcgcccgcaagggtttgctcgcggtttcccgccgacggatgaacggcaagccccgacggcttgttgaccgcaagaatgtcgccgtcctcataaacaatgtcgagaggaatgtcgcagaggggaatgttttcagagcttttttggggcgggcaaagggtcagcacctcgccgacagccagcgtgtgcctgaccgtgaccgattttccgtcgatttttatgccgtcggaaaacttaagccgctttatctccccgtgcgaaagaccgagtccgttgtataaaaagtgcagcaaaaccgtgccgccgtcctgccgcccgataacgatttttctgtccatgctctcccctcccgcttttttaaaattatctcacacccgccaaaaaaagtcaacagacataaaaacgggcgttaccgctgttttcggcaccgcccgtattttcaattgatttcagttccacattttgagcaaaaggcctcgttgcccttaatctcggccttacagtttggacaaagcttcacgtcgtcccccgacgcaccgcaatgaggacagttttttctgagttttgcaccgcaggaggagcaaattttttgtcctttcggattttttgctttgcacgtcggacactcgacctcatttcccccgatttcagcgcccacagacagcacggcggattttccgccgtacattatgaatttttcgatttctccgcaatttccttgggaagccgggatgtttgaccgctccgaaagctgccgtgcggcaatccttttttcgtgtgaaattcgtgtgcaatttaatcttgcgtataggataattatatttttcggcaatataacacggctgccgaaaatcaccgaaacccgcataaacaaggaaccgctgtttatacgggttttctaagtacgatcgcgcgacgaaacggtacaaaataaaagcttcacgaatgtttgcaccgacacttgttccgctacttataagttggttcgttaatacgcttttttagtttgctttacacagttacaaaccttgataatctgcaaagcaaattctttggattttataattaacggaccaccggacatattatcgccgccttttttaatcatccgcgcagcggataccgcacttcttcaccattacctattacttattacctcccaaaaatcccgacatggattttattttgaagtaagagtgaagaagtaataagtaataagtaaaaatcccgcccactaaagtgaacaggatttttggtggaggcgacgggaatcgaacccgtgtccgaaagccttttcccgaaaatttctccgagcgcagccgttcgtttaaaattccctcatttccctgccgagcggcaggccggaaaactcggtagcctcttattcataagccggttcgaggcgcatgccgacttacgttcaccgctaatcgacgcctttatcccgaccgcggtacttcgggtaaagacggctgcttaattaagcagcgtaggcaacagtattgttgtcgtttaattttaaagttacggcgtttaaagcgtgtccgcaacgctgctcgcttatctcggtgccgggcccccgtcgaagcctttacgcccccgaatatacgccgaaaagctttcggcggttttattatctcatattctctttaaaaagtcaacgcaaagctctttccagccttcacattccttcgacaccatctcgctggtctcgtcgcaaaccgacagcccgtgcggaccgctttcatacatatgcagttcaaagggcacgcccgccgctttaagagccgacgccatgatcagcgaattttccgacggaacaatatcgtcgtcgaccgtctgccaaataaaggcgggcggcgactttttgctcaccatgttttcgcaggaaaggtcgggaagctcggatttttcgcgaaaatcctcacagccgaaaagattgacaaatgagccctcgtttgcaagcccctttttgcttgttataacgggatagcaaagcacctgaccgttgggtcttgacagcgtttcgtcgatttcaaggctttttgcaaggtcgctgtcacaaccgttcgaaagccacgccgcaaggtggccgcccgccgaaaaaccgatgacaaaaaccctgttttcatcgacgttatattcgtcggcgtttttgcggatgtgctccacggccttggccgcctggtaaagaggcgcgggaaaacaggcctctccggtgtttatcgaatatcgcagcacaaagcagttaaagcccctggcgttgaaatatctcgccaccggctcgccctccctgtcggaaacaaagccgtagccgccgccgggcagcacgagaattgtcggacgctttttaaagggacggccgtccacctgccgctctatgagcatgggacggagggtcgcctttttgccatcatattcaaactcaataatattttccatgtcaaatcacctgaaattgcgttccttgattgcgcggtcgatgttgcgctttgcgtcctttcgggcggcgtcctcccgcttgtcgtatatttttttacctctgcaaagtcctacgctgaccttgacaatcgagcccttgaaatagaccgaaagcggaatcagggtcagcccctgctgctttagggtgccgtagagacgcattatctcctttttgtgcataagcaactttctcacgcggtagctgtcgcggttgaacacgtttcccttgtcataggggctgatgtgcattccgttgacaaaaagctcgccgccgtcgattgagcaccaggaatccttgagattgactccgccggcgcgaatggccttgacctcggtgccgaaaagctcgattccggcctcgaaacggtcctccacaaaataatcgtggaaggcttttttattgtttgcaatgggttttatggatttgctttccacaatttttctcctttaaatctgatttctgccctttaaggctctcgacagggtgacctcatcggcatactgaaggtcgccccccacggggattccgtaggcaagacgggaaattttaatgccgagaggctttaaaagctttgaaatatacatggccgtggcctccccctcaacggtgggattggtggccatgatgacctcctttacctcgtcgttgttcagacgggcaagcagctcctttatgcgtattccgtcgggacccacgccgtccatgggggaaatgaccccgtggagcacatggtaaagcccgttgtaatcccccgtccgctcgaatgccatgacgtctctcgggtcctcgacgacgcagatggtctcgcggtccctcgtgcccgaagcgcacaccgagcagatttccccgtcggtgagattttggcatattttgcaggagtggatttttttgtgagcctccacaatggcgtcggcaaacttttcggcctcgccctcgggaaggccgagcacaaagaaggacagccgctgagccgtctttttgccgatgccgggcagacgggcaaactggtccacaagctcctccaaaggagccacgttataggaagccatgcttaaaacattcctccgagaccggggatgttcataccgccggtgattttgcccatttcctcggttgcggtgtcgtcaaccttctgctgggcggcattgaccgccgcaacgatcatgtcctgaagcatttccacgtcgtcggggtcgacggcctcgggctttatggttatgcttttgattttatggtcgccggtaacggtgacctccaccattcctcccgaggaggcggtgtgctctctggtttcaagctcgtcctgaagagcctctgcgtcggcctgcattttctgagcctgctttatcatgctgttcatgttgccgggaccgccgccgtagcctttgggtaatcttgccttcattgttatctttcctttcggtttttaatattttatcacggaaaatgtgctttgtaaatatttaactttcgacaacgtccactcccttggccttcatctcgtcgagaaaggccttcatggggtcggccttggccttttcggccgcctcatagggaccgagacggaactgctttcccgtcaccttcataagggccgagcgaatgtcgtttttatttttggattccttgcgtataagctcgaaaaacatggggttgccggattttatgagaagcaggttttcgcccttgagataggccgagctgcccctgagtgtggccgacatcatgcggtttatgtcggaaagggccacaagcacctcgggccatttgtcaaagcgaaccacaccgtccggtgcgggcggcgcactctcgtcggatttttgcgccggagcagcttcaaaaatcggcggcgcaggacgcctttcctcggtaatttccggagccttcggctcgggcggtctttcgggcggcatatgggatgccttttcggggatttcaactttttcgcccggctcctcccaagggggagcgtcctcgtcggtaaatcggtatttatcggccgcctcttcggcgaagaaaatcccgtcggcctgttctttttgctctttatgctcttttttcgtttcttcgaaaatcggatcgggctccgcttttttcaaattttcggtcgaattcttttgcggcacagaagaaatcaaagagattctggaaaaggaaaaatttgaatcctctatatacattatggttgacacactggagtatctgaaaaagggcggacgtattacaccggctgcagcagcactgggaaccttactgaaactgaagccggtattgcagatccaaggagaaaagctggatgcatttgcaaaggcacgtacggtaaaacaggcaaaaacaatcatgaccgaggctatgaaaaacgattttgagaagcgttttcacagcccggatggggagaagatgaatctggaactggcctaagatcggaaga

SEQ ID NO: 4597 - DNA, 18736 bp, Unknown
  16S sequences of unknown bacteria
cccgcctcggccgccgtcgcgacggtgtggagcgcctcgtccatctcgccggggaacacgagcgtgttcgccgtgaggtagaccttgcgggcgcgcagatgcgcgtcatcgcacgagcgcttgaggtcgtcgagcgtgaagttgtcggcgttgcgccgggcgttgaaggcgcctgcgccaaggaagacggcatcggcgcctgcgccgagcgcagcctcgaacgaggcgcgattgcccgcgggtgcgagcagttctggttttctcataaatcctctaccacgttgttgtctgggaaaaagatatgcggccgcacgctctacatgcgcgccgtgtcggcggcaaggcgctcgcgcgcctggtcgagctggaccttgacggcatcgtgccccgtgccgcccgccgtgatgcggcgcgcgacgatcttgtcgatatccaccgcatcgagcgcgccggcgtcgaacagcggatctgcctgcttgagctcgtcgaccgagagctcctgcagggtcttgccctgcttctcgcactcgagcacgagcttgccgaccaccgcatgcgcgtcgcggaacggcatgcccttgccgaccaggtagtccgcgaggtccgtcgccgccatgaagccgccgtgcgcgcccttgcgcatggcatccgcgttgacggtcatcgtgcggatcatgccggtcatgacgacgagggaatcgctcagcgtgtcgaccgcgtcgaacacgccctccttgtcctcctgcatgtccttgttgtaggcgaggggcagccccttgagcgtggtcagaagccccatgagatcgccgtagacgcggcctgtcttgccgcggatgagctcggcgaaatcggggtttttcttctggggcataatgctcgagcccgtcgagtacgcgtcggacaacctgatgaactgaaattcgttgctgctccagtagatgaactcctcgcacatacgcgacaggtgcatcatcgcgaccgagcacgcgtacgtgaggtcgagcaggaagtcgcggtcgctcaccgcgtccatgctgttcttgctcacctcggaaaagccgagttcgtcggcgacgaaatcgcggtcgagcgggtacgtcgtgccggccagcgccgcagagcccagcggcagcacgtcggcggcatcgtatgcggcgcgcacgcgcacgaaatcgcgcgtgaacatccagtagtacgcgagcatgtggtggctgaacaagacgggctgcgccttctgcatgtgggtgtagccgggcatgacgacgccgaactcgcgcgtcgcgacctcgagcagcgcgccgcggatgtcgagcagctggtgcatgagcccgtgcgcgagcttcttggaatgcaggcgcgtgtccgtggcgacctggtcgttgcggctcctgcccgtgtgcaggcgcccgccggctgccccgatggcctcggtgaggttgcgctcgatggacatgtggatatcctcgtcctcgatctcgaagtcgaagctgccgtcctcgatctggtgcgcgatgtcatcgaggccggacctgatgtcttcggcgtctttctcggagatgatgccctgcttggcgagcatcttcgcatgcgccttggaaccggcgatgtccgactcccacatgcgcttgtcgactggcagcgaagcgccgaactcctgggtaaattctgcgggggcgtcttcgaagcgccctccccacaaagcatcgttctcgtgcgcctgctcagccatagtgcggtcgacctttcgttgcggtggttagaaaagatggcaatccgccggcaacggcgaatgcggcaattatgtcacagctttgtctacaatagcccctacgtggacagaggagagattttgcagaataaaaacaacacttcgcgaagcacggcgtccaagcgtgacagcttccggtcgaagcggggcttcatcctcgcgtgcatcggctcggctgtgggcatgggcaacatctggctgtttcccacgcgcgtctccgcctacggcggcgcgacgttcatcattccctacctcatattcgtactgctcatcggctcgacgggcgtcgtcgaggaaatggcgttcggacgggcgcgccacgccgggcccatcgaggccttcgcgcagaccaccgaaaagcgcttcgggtcgcgcaagccaggtgtgctcatgggccttctgcccgtggcgagctcgcttgccatggcgatcggctactcggtcgtcgtcggctggatcttcaagtacacgttcgacgcgctgaccggcacgctttccgccacgcagagtgtcgaggcctttggggcgcagttcgacgccgtggcgggcgggaacggtttttggctcaccgtggcgatactcgccgccgttgccatcctcgtctttggcatcggcaagggcatcgagaaggccaacgaggtcatgatgccgctgtttttctgcctgttcgtcgggctcgccatctacgtattcacgctccccggtgcggtggagggctacaagtacatattcctgctcgatccgaagggccttgccgatcccctcgtgtgggtgttcgcgctcggtcaggcgttcttctcgctctcgattgccggcaacggcacgctcatctacggctcgtatctcgacgatgcagaagacgtccccaacagcgccaagtacgtcgccctcttcgacacgatcgccgctctgctcgcatcgctcgtcatcatccccgccatggccgtcgccggccagcagctctcgacgggcggcccgggcctgcttttcatctacctccccaacctgttctcgacgatgcccggcggacccctcatcatggccgtgtttttcgtggcggtgctgtttggcggtctgacctcgctcatcaacttcttcgaggcgccaattgcgacgttgcaggagttcttccatctcgaccgcgcgaaggcctgctttgccattggggcgatcgtcctggtcgcgagcctgctcatccaggggatcgtctcgcagtggatggacgtttgctccatttacctgtgcccgattggcgcgctgttcgccgccatcatgttctattggttctcgggcaaggactgggtgctcgagcaggtgaacaagggccgcgccaagccgctgggcgcgtggtactaccccatgggcaagtacgtgttcgtcatcgcgaccgtcgtcgtgctggtgctcggctcggcgctcgggggcatcggctgatgcccgcagcagcaaaggggctcgagctgctcgtgctcgcgagcggcagcaagggcaacgcctcggtgctgcgcgacacggcgagcaagcgcgccatcctcatcgactgcggcatcagcaagaagggcttcctgcagcggtgcgagacgctcggatttgacccgcacgagatcgaggcggtcttggtcacgcatgagcacaccgaccacacgaaggggctcggagtgctctaccgcggctttgcaaagctcggcatggcgccgacgctgtacacgggcgagaagatcctcgcggcaagcgcccaggtccagcaggccaccgagcactgcgacgtccgcttcatcgacgacggcagcgacgagtccgtcgcggggatggcggtgcacgcctttgccacctcgcacgatgccgttcagtcgtttgggttcaggttcgatgggcgaagcgacagcatcggcttcatgaccgacacgggcgtcgtgacgccgcaggcattcgaggcgctgcgcgaatgccgagtgctcggactcgagagcaaccacgatgcgaagatgctgaagtacggcccctaccctgcgcgcctcaaggcgcgcatcgcctccgcacgcgggcacctctccaacgagcagtcggcgggcgcactcgaggagctcgcgtccgaccggctcgaagaagtcgtcgcgctccacgtctcggagaacaacaacgactacctgctccccgaaaagtcgctcgagcagacgctcgcgctcttgtcgcatcccgcgcgcgtgcgcgttgggttccagcacacgccgataagggtgccgtagcgcgattttgacaggcactccactccaataaagttataatttgcactcgttatgcggagaggactccggcgcagccgggattgaagaggtttttatgcaatcaggcgactttatcgtaatgctcgcgattctcatctacttcatcgcggtgctcatcatcggcttttcctacgcgaagcgctcgaactcatcgtcgtccgagtacttcctgggaggccgcaaggtcggcccgtggttcacggccctttccgcagaggcgtccgacatgtccggctacctgctcatgggcctgccgggactcgcgtactttaccggcgccgcagacgtcggctggaccgccatcgggcttgcactgggaacctacctcaactggctgctcgtcgccaagcgcctgcggcgctactccgaggtcgcgggcgacgccatcacgcttcccggcttctacagcaaccgcttccacgatgacagaaacgtcatcggcaccatcgccgcggtcatcatcctcgtcttcttctgcgtctacaccggcagctgctttgtcacctgcggcaagctcttccattcgctgtttggcgtggactactcgctcatgatggtcttcggcgcgatcatcgtgttcctctacacgatggtgggcggttacctctccgtcgtcgccaccgacttcctgcagggcacgctgatgttctttgccctggccgtcgtcgtaatcggctcgatcaccatggcaggcgggctcgacaacaccgtcgctttcctgagcgacatccccggctacctcaccatggtgcagaccgctgtccccgtcctcgacgccaacggaacgcaggtcgtcgaaaacggcatgccgctgttcgacagcgtgcccaaagagtacggcctgctcgccatcatctcgacgatgagctggggccttggctactttggcatgccgcaggtgctcgtccgcttcatgggcatccgcagcgacaccgaagtcaagcagtcccgccgcattgcaatcgtgtgggtaatcgtctcgatgttctccgcagtgatgatcggcatcatcggccgctacctcatcccgacggaactgctcacgcagtcgacggcagagagcatcttcatcgtgctctcgcgcatgatgctccccgcgtttttgtgcggcatcgtcgtcagcggcatcctcgccgcctcgatgtcgagcgcgtctgcctacctgctcatcaccggctcgtccgttgcggaaaacatcttccgcggcatcttcaagcgcaacgccaccgacaaccaggtcctcatcgtcagccgcatcacgctggcagtcgtcctgcttttcggcatcttcgtcgcctgggacgagaactcggtcattttcaccgtcgtgagctacgcctgggcaggcctgggcgcctcgttcggcccgctcacgctgttcagcctctattggcgccgcaccaccaagcagggcgcggtcgcgggcatgctgaccggcgccgccaccgtgctcatctggcacaacctcgtgaaaccgctcggaggcgtctttggcgtgtacgagctgctccccgccttcattttgggcagcctcgccatcgtgattgtctcgttgctctccaaagagccgtctcaggctatctacgacgagttcgaccactacatggacgagcccacactcgagatgcgcgacctcgacgccgtcctcgaagacggcaagccgctctctggcgacgcgatggaatacgccacgagcacccgcccgagagcagcaagcgccgacagcgccgaagaggccctggcaaaaggtaccgaagacgaggaaacgctcgtatagacgcccgcgtagacttcgcgtctacctgcgcccgagcaggtgagaacagccccgctttccagcagatggcaaagcggggctttttgctgcctgcatgcggcagcgcacggggagtactgctgggcactgcacggggcagcccgcccgagcgtgcgagaaggggctattcgccctccggcgcagcagtgccgccatcttgctccggcagatagtctttgaccgaatcgtagatgagctgctcgtagaccttcggcccatccggctgacgcaagtgttccttgtcgtcccagaggtactcccccatatggtctttgaccagggaataccaatcgatcagatggacgttgtcgtgcctgtcggcaaaatcggccagacgcgcgttcgtatccgcctcgaagctgtcggggactttcacgttgacgaggaacagctcgcgctcgtcgcccacgaggtcgcggatctcctcgagctcgccgtctttgatcgggtggttggaaaagcacgcgaagatgacacagtgcccgacgacgccttggtccgaataccccttgtagacatcgcgcgcctggaacagccagcgcccgatgtagctgtcgttgaggccgttgggaaacagtgccttgaactcgtcgaccgaatcgcccgggattgagtcgccgatcaggagcgggttgtacacgccgtcttggtgctcggggacctggattgcctgccccgccgccgcacccgtgctcacgagcgcatcacgcgggacgtagtcggtatcgggcaccgccgcgatccccacgagcgcgataagaaggaccgccaccgccgagacggccggcgccagaaccttcgcgcgcaggcaggcatggacgtcgaacgactttgcgcgcagcttggcgaatgccttaccgagcgcacccttgcgaatcgggtcttccacaaaccggaacgagagctccgaaatgccgaaggtgagggcgagcacgagcaggcagaaccaccaggaatgcccattgagcgcgggatcgagcggggcgagcagcaagatgagcgggaaatgccacaggtacatgccgtacgagcgcgtgccgatccagacgagcggacgcgcctcgaagaccttcgcgagcctgctgcggggatagacgagcaccgccacgagcacggcggcgagcacggaggcgagtgcgatgccgccccggtacatgaacggcgacatgccatcggccacaaccatcatgacgatgaggccgagaagcgcgagcgtgcccacggagtcgagcaggcgaacgctgcgctcgggcacgtcgcgcgtgctctcgagcgacagcgactgccccggccagctcaaggctagccaggcgccgatgagaagcgagaacgcgcgcgtgtcggtgccgtagtagacacgggtcggatctgcctgcgggttgtagagaagtgccatgagcagcatcgatgccgccgcgagcgcaaagcacacgcgcccgagcaccttgcgcttgccgcccagcttgaacacgagcagaagcacgagcggccacacgacgtagaactgctcctcgatggcgagcgaccagaagtgcgtgagcggcgaaggcgcaccgaggctgtcgaagtacgacaggccgcggaagacgtaccaccagttctggaaccagaacagcgagggaatgatgtcggggcgcatcttggtgagcaacgcgtggttgaacagcacgcacaacgccgccacgacgaacacgacgacgaagatcgcggggaacagccgccgcacgcgccgcagccagaacttggggaggttgatcgtgttgctctcgcggtactcgttgacgaggatgccggtaatcaggtagccggagagcacgaagaaaacggtgacgcccaacaggccgccatgcacgtgggcgctgcccaggtgatacgcgatcacgcccaggacggccagcgcgcgcaggccgtcgagcgccgggatgtagcggcggtcatgctgcgccttctcgtatccagcgtcgcccggtttcgcgggctttccaggctccttgcgggcacccgtggatgcagcgcccacgccgtagcgggtgctgtagtatccgggcttcttacctgtctgggctcctgtctggcctgctgctgatttattgcgtctgcttgcgccgctgctggtgctcacgtgcttcctctcgacaatacgtgtgaatgtacttcacgcgaccagagcgggcaaggcgctcgcatgattcggcacgattcgtccaaaagctgcgcaaaaaatgaagagagggggcgtgcgccgtcccctctcttcttgcaagcgtgcctgttgtcggcgagaggctacttgctctcttcgaccttgcggcgctgacgtgcccagacgcgggtgggcagaccgtgcaagtcgatgaagcccttggcggagtcacgatcgaaggtgtcgccctcgtcgtaggtcgccaggttgtagtcgtatagggagtactcgctgcggcggccaacggtcacgcaggaacccttgtagaagcgcaggcggacatcgccggtgagcaccttttgggtggtcgcgcagaagccgtcgagggcctccttgagcggcgagtaccacaggccgttgtagacgagcgtggcccacttctgctcgacgacgggcttgaagtggaggacctcacgctcgaggcacaggtcttcgagcgccttgtgcgcctggatgatggccagcgcgccgggaacctcgtagcactcgcgcgatttgacgccgacgagacggttctcgatcatgtcgatgcggccaaagccgttacggccggcaatctcgttcatcttgaggatgatctgatggaagctcatcttctcgccgtcgagcgcgcacggcacgccctgctcgaagctgatgatgacgacgtcgccctcggcaggcgcctcgtagccgggcttggtgagggtgtagatgtcctcgggcggctcgttccaggggtcttcgagcacgccgcactcgatggcgcggccccacaggttgtcgtcgatggaatacggggagtccttggtggtgggaaccggcacgccgtgctgctttgcccactccatctcctgcggacgcgtgcgcaggtcccactcgcgcaccggcgcgatgatggtcaggtcggggtcgagcgactggacggcgacctcgaagcgaacctggtcgttgcccttgcccgtgcagccgtgcgcgacgtacttggcgccgtactggtgcgcgatgtcgacgaggtgcttggcgatgaccgggcggctcaggcagctgaccatgggatacttgttctcgtacatgcagttggcggcaagcgccttggtgaggaagtcgttgacgtactcctcgcgcatgtcgatggcgagcgactcgaccgcgccgacctgcagggccttctggcggacgtactcgaggtcctgacgctcctgcccgacatctccgaccatcgcgatgacgtcgaggcccttttcctccatgagccacttgatgcagaccgacgtgtccagaccgccggaatatgcgagcacaaccttgtcttttgccatgtgcctaaatcctttcgtagtaaacgacgactcgagccgagccatcaaccgtacccaaatctatttattcgagagcatgctgtccactctcttttggaaaagttcccccgcttcctcgtctgcggtgatgacgaggatcgtgtcgtctccggcaatcgagccgagcacgccttcggggagcgccgagtcgagcgcggcggcaacactcgatgccgagccgggctccgtgaacagcagcacctggttgccggcgcgcttggtcgcgcgccccgtcgccgtgaggatggtcttgaagcgcaagtcctcggcgagcgcgtagaagcccctctcgtccttctgcaggtcgaggtccgagatatccctcgagacggtggcctgcgtgacgtcgaagccatgctccttgagcgcggtcaccagcccgtgctgggtgcgtatgccgcccgagcgcacgagcgcgcggatctggcgctgcctgtcttcccgtaccgacgacatgcctaccccattaccagggacagcagggccttctgggcgtgcaggcggttttctgcctcgtcgaagatgaccgactgcgggccgtccatgacctcgtcggtgacctcctcgccgcgatgcgccggcaggcagtgcatgaacagggcatcgtctttggcaagcgccatgagcgccgcgttgacctggaagccctcgaactccttgaggcgcttgtcgtgctcggcctcgtcgcccatcgacgtccacgtgtcggtgaggacgacgtcagcgtcggcgacggcgtcttgcgggttgccgaatacctcgatggtcgcgcccgtctgcaaggcgatggcgcgtgcctcctccacgacgacggcgtcggtggggtgcgtggacgggcagccgatcttcacgtgcatgccggcaagtgcgccgagctcgacgtaagtgttggacatgttgttgccgtcgcccacataggcgagcgtgagccccttgagcgagcctttgtgctcgcggatggtgagcgcgtcggcaaggccctggcacggatggaaatcgtcggtgagcgcgttcacgacggggatcttggcccatttggcgatctcttcgaccttggactgctcgaaggtgcgaatgacgatcgcgtcgacgaagcgctcgagcacgagcgtcgtgtcgtgcacggtctcgccacggctgaacgccgagtggttatcgctcatgacaagcgggtgggcgcccaggcggtaggtgccgatctcgaagctcgagcgcgtgcgcagcgagggcttctccaggatgatggcgaccgattcgtccttgcacggcgtctcgtggatgccggcggcccaatcggccttctgctgggccgcggtgtcgagcacgagctcgaattcctcgggcgtgaggtcgagcaggcggagcaggtcgcgccccgcgagtggattgccgttagtcattgcatgcctcctcatagcagctgggaagtgcgcccatgagcgcatcgacgtcttctttggcgatgatgagcggcggcaagaagcgcaggatatccgccgcgggagcgttcagcacgaagccggcctcgagcgccgccatgacgagcgcggaggcgacgggcttgtcgagcgacacgcccaccatgaggccctcgccgcgcacctcaacgacgaacggcagagttgccagctgctcgcgcaggtaggcgcccacctcgcgcacgtgctcgaggaaaccgggctcgcacatgacctgcgtcgtcgcatccgatgccgcgcaggcgaggttgctgccgccaaaggtcgagccgtgcatgccgggcttcatgaccgcggcgatgtcctccttggcggcaaacgcgcccatgggcacgccgtcggcgatgccctttgccatcgagacaatgtcgggctcgacgccgaaggtttggaacgcaaagtagtcgcccgtgcggcagaatcccgtctgcacctcgtcgaagatgaggagcatgttgttctcggacgtcagcctgcgcgccgcctggaggtattccctcgtgcacggccagacgcccgactcgccctggatgggctcgagcatgagcgcgacgggtttcgtgccgtcgatttcggtgtggatggcctcttcgagcgcggagatgtcgttgagcggtacgtgtgcgaagcccgtgggcagcggtgcgaagggatcctgcttggagtcctggcccgtcgccgcgagcgtcgcgagcgtgcggccgtggaacgacttgacggccgtgatgatgccgccagcgccgtttgcgtgctccttgccccagcgacgcgcggtcttgatcgcgccctcgttggcctcggcaccggagttggcgaagaagatgcgccacttggagcccgtcatggcagcgagcatgtcgttgatgcgcttggcgagctcgccgcggtgctcgatgtagtagtagttgctcacgtggatgagcttgtcggcctgttccttgatcgccgcgacaaccttggggttgttgtggccgacgctgcacacgccgatgcccgccaaaaagtcgcggtactccttgccgtcgtcgtcgtacaggcgcgcgccggcaccgcgcacgaactccacaggcttgcgcacgaacgtctgcatgaggtattcggaatcgagctcttgctgctctttcaacgatgcgcccatctgctatctccttccgatggactggattgactggtcgagtttgcttgcgaagttgctgaccggggcctcgacgaagcccgggtcgatggaatcgtcgtgatggcgcatgaccatcgtgccgacgcccgcgtcggtgaagatctcgagcacgagcgcgtgcggcgtcgtgccgttgatgatgtgcgccttgctcacgcccgccgaaagcgcggtgacgcaggcgttgatcttggggatcatgcccgacgacatcgtgccgctctccgcgagcttgaccatctcggagagcgaggcgcgcaacacgagcgtcgacttgtccgagaagtcggtgtagatgccgtcgacgtcggtgatgaagacgatcttctgggcgccgatggccgcggcgatctctcccgctgccgtgtcggcgttgatgttgtagtcaccgtcttcggaataccccaccgtggcgatgacggggatgtagtcgacggcgagcaggtcttcgatgagcgtcgtgtcgaccttcttgaccttgccgacgcggccgagcttctcgtcgagcggctctgcctggatgatcttcgcgtcggcgccgttcaggccgacggcaaccgagccgtgccggttgatggcgctgaccagctcctggttgacctggcccacgagcgtcatcttgacgacctccatggtggcctcgtcggtcacgcgctggccgttctcgaacctgaccggcatgtccaggcgcttgagcatggcgttgatgttggggccgccgccatggacgatgatggggttcgcgcccatcagcttgagcatgatgatgtcgtcgacgacggcgtcgcgcagctcgccggcgaccatggccgccccgccgtacttgatgacgatcgtcttgcccgtgatgtcttcgatccacggcagcgcctcgatgagcaccttcgcccgggcggagttggacagcgcgccaacctcgtcgatatcgataatctcgcgttgctctctgaaaatcatggttccttcttagctgcggtagtccgcattgatgctgatgtagtcgtgcgtcaggtcgcaggtccagatgcgcgtcgacgcgtctccctggtgcaggtcgacgtcgatgacgacctcgtcttgctcgaagcgtcgcagcgcctcttcctcgtcgaacacgatggccaggccgtcgcggcacacgggcagcccgaggatgtcgatgtcggtcttctcctgctcgaaggcagcgccgctgcgcccgagagccgctgcgacgcgcccccagttgcaatcgtggccggcgatggcggtcttcacgagcggggagttggcgatggtgcgcgccgccttgtcggcgtcggcgtcgtttgccgcaccgcggacgttgaccgtgacgagcttggtcgccccctcgccatctgcggcgatctggcgcgcgagattctcgcagaccgcgcgcagcgccgttgcaaacgcggtaaaggccgcatccccgatttttgcgggggcaccctcgcccaagcacgagctcatgagaaagacgctgtcgttggtggaggtatccgagtcgacggtgaccttgttgaacgagtggtccaccgcctctttgagggcagcatgcgcggcctctgccgaaacgggcatatccgaggtcaggacgcagagcatcgtcgccatgtcgggctggatcatgcccgagcccttgcacatgccgccgatgcggtagctgtgctgcccgacggagaactcgaccgcgcattccttggggtgcgtatcggtggtcatgatggcaagcgccgcgtcatggctgccctcgcgagagagcttggagacgagctgcggcacgcccgtctcgaacgggcccgtgggaagctgcacgccgatgacgcccgtcgacgcgacgaagacctcgtctgccggcacagagagcgcctgggcggtgatttcctgcatggcacgtgaagccgcgcgccccggctcgcccgtcgcggcgttggcgatgcccgagttcaagatgaccgcgcgtgccttgccacctgcggcaacggaacgcgagacctgcaccggtgccgcgcagaacacgtttctcgtgaacgtgccggtagcgacggtatcctgcgctgacgagacgacgagcgcggcatcgaagcgctcggggctctttcgaaacccgatatgcgcccctgcggccgaaaagccttccggggccgtgacgccaccttcgatgaactcgagttctgttgaatcgtcagccatgtctacctcgcaaatcgccgcgcacgccgtggtgcgatttttcgtcaaatgcaggtaggacccttgcgggccctaccagtagcgtattctgcaactaattcattcgagaatcaatatttttattaatctatgcaaaatatttgcattcattgattgatttatgcacattaagcgtgttcctgcgccattgctgcacttgcgatacgagccgtgtcgcgggcgatcatgagctcttcgttggtggggaccaccagcagcttgaccttggagcgcgggtcgttgatgacgcgctcctcgccttcgaccttgttcgccttgtaatcgaggatgatgccaagcgactccatgccgctcaagatcatgcggcgcatgcgctcgcagtgctcgcccacgccgccggcaaacgaaatcgcgtcgacgccgcccagctcggcgatataggcgcccagcgtcttcttgacggaggcggagtacatgtcgtaggccagcgtggcgcgcttgtggccggcgatggtcgccgccttgatgtcgcgcaggtcgctcgacaggccgctgatccccagcaggcccgactcgcggttcatgatctcgttgatctcgtgcggagtgtagccttcctgctccatgaggtacgtgacgatggaggggtcgatgtcgccgcagcgcgagcccatcatgacgccgccaaggggcgtgaagcccatggaggtgtcgacggacatgccgtggtcgattgccgtgaccgagcagccgccgcccagatggcaggtaatcagcttgaggtcttcgagacgctcgcccaagatctctgccgtgcgcatggcgatgtagcggtgcgaggtgccgtgggcgccgtacttgcggataccgtagtgctcgtagaactcgtatggcagcgcgtacatataggcgcgcgggggcatggtctggtggaatgcggtgtcgaacacgcagacatggggaacgtttggcatgagttcgcgcgcggcgcgaatgcacttgaccgcaggtgggttgtggagcggtgcgagctcggagcacagctcgatgtcggcgattgcctggtcgtcgacgagcacggactcgctgaacttctcgccgccgtggacgatgcggtagcctaccgcgccgatctcgtccagggtgtcgatccccgagttcgggtcattcacgagcgtgtcgatgacgatacgcatggccgtcagatggtcgtgcatgggggtctcgatgacgtgcacgtcatcgccgctgccccacagcttatggaaggaatcggaatagccgacgcgctcgcacagaccctttgtgatggtcttctcggtctcagaatcaattacttgatatttgagggacgaactacccgcattgatcacgagtacgtacatgaatgtctcctacagaacgtcgtcaggtaaagaactcgtaacattgtctcacagagaatagacgcgcagctcggcaaaagcggcaagcggccgatagcctgccgcatttgcctgcgtcgatgcgtgcgcgactagctgagcttcgtgtcgacttcgtcgctgttctcgggctcgagctctcccatgaggaccgtcaccttctgctgcgcgtcgtcgaggcgcttctgcagggcgccgagcaaggccacgccgcgctcgtatttctggatgctctgctcgagctcgagctggttgccctcgagggcccggacgatctcgtcgagctccacgagcccctctttgaagctcatgctgtcgagctgggatgcgtctaccttgggttcgtctgccattagccttgcctttctactgatgccaccgtgcaggaaagcgagccgtcctgcacctggatacgtacgttgtccccttctgagaccttgccgacgctgtcgacgaccgagtggccgtcttgcgcgtaggtaatcgagtagcccctgccaagcgtcttgagcggagagagcgcctcgagctttgccgcggcaagcgacatctgctcacctgcatcgcgcacgagcgccgggcctgccgtcttgagcttctcgcgcgcgacggcgaggctcctgtcctgcaagaccagcatgctgggccccgcgctgcgcaagcgttgccgcagcgccgcaagcgacaccgcatcgcgcttgagcgcatcggggattgcccgcgcaaggcgctcgcccgcaatatcgagggcctgggaatacgggcccgtcaggtaatgcgcgtcataccagagctgccggtcggacaggcgcgaaagctcctgctcggcacccctgatgcagccggtcagcgcagcaccgagcgcctgggtggcgttgtccaccttgtgctgcagctcctccaccgatggggcgaccgcttccgccgccgccgttggcgtggagcagcgcctgtcggagaccatgtcgcacaaggagttgtcgggctcgtggccgatgcccgtcacgacggggatggggcatgccgcaaccgccctggcgagcccctcgtcgttgaagggcatgaggtcctcgtaggagccgccgcccctgacgagcaagatgacgtcgggcgccgggaccgcactgcttgccgcagcaagaccctcttcgagatagcgtggcgcgtctttaccctcgaccgggacgccgaagaccatgagttccccgaggggatagcgccttctgagcgtgcggatgacgtcatggactgccttgccacgcggcgaggtgacgacggcgatgcgctgcggcagcgcgggcgtcctgcgcttgcggacaggatccatgaggccctccgcctcgagcttgcgcgcaatctgcgccaccttgaggcgcaagttgccctcccctgccaaggcgagcctgttgaccgagaactgcatgcgccccttgacgggatagcatgagaagttgcccgtgagctgcacgagcatgcccgcgcggagcgtgactccactcgcgcggtacctgtcgcgccacatcaggcagggcatggcgcacttgtcgtcgcggatggtgaagtaggccgccttgtatcccggcttgtcgttgaactccgagacctcgcccaccacggtgaggcggatttgctcgagtccgcgcttcgcggcgttcatggcctgcgtaacggagtatgccgtttcctcttgctgctgctctggcatgatgcgcctactcgttgcgtgcgacgccgatgaagtacagcagctgcatgatactcgtgagcgcgccggcaacgtaggtgagggccgcggcggtgagcacggtacgcgcgccacccgagacatcgtcttcgacgaggccgagaccgttgtagatggtcacctgcccggactgcgtgtcgtggcgaatgtattccatgccgcggtgcgaggcgttgaactcgaccggcagcgtgaccaggtggaacaaaacggcaaaggcaaacaggatgatgcccgcccaagtgaggcccgtgatgttgagcatgaggccgaacatgagcagccagaaccacacgctcgacccgaagtttgcgatgggcacgagcgccgtgcggaacttcatcggggcgtacccgcgcgcgtactggaccgcatgcccgcactcgtggcaggcgatggccatagcagagatgctgctcgaatcgtacacgccctctgacaggcggacgacggggccgcgcgggtcgaagtggtcggacaacgagcccgccacgcgctggacggggacgtcttgcatgccgttgtcgtcgagcatgcgccgggcgatctgggcgcccgtgagcccggtcccgttggagtattttgagtacttgcggtacgaggagttgatgtaggcctgggtggcaaagcccagcaccaggctgattatcatcagggcaagataggtcatagcgttccaatctctgcgaaattcgcactaacttttgcccatgataaccgctgggtgagacacgctttcttactggtgcctttccgtaacttcgatggcaccgttctccagatacatcacaagtttgccgtcgagcatgtcgacgagttcgcgcccgacgagctcatagcgccatccggtcaagacgggcaggccatcgcggtgcccgcgtgccagacgcgtgaggtcggcatgcgttgccaggatgggggcggcgacgtcgttttgcttggccctgatctcgacgagtgccgcgagcagctccactgccccgtcgacctcggtattcccatggggcttacggtcgagtttgggccactggctttggggaagcgccttgcccttgcgcacggcctcgagaatctggttgacgtcgcggccgttcagcttgttggcaagaccgcgcacctcgagcaggccctcgcgcgtgcggggcgccttgcgggcgatttcgacgagggcctcgtccgggagtacccacttgcgcggaatattgcggcgcatgccttctcgttcgcgccatgccgccacctcgcgcgcaatggccagctgcccgcgcgagagcgtcgagacgcgcttgaccttcctccacatct

SEQ ID NO: 4598 - DNA, 3975 bp, Unknown
  16S sequences of unknown bacteria
ggcggggatagagtgtatcggaaattgtccgcacatcctccggcagtcaaaacgccgtcctttcacgaggttcgcgggcagaggcaggggcgcatccgctactatgtcaagactgcaatcacaaccgcacgctcagagcgcgaccgcgcgcatccgacctggagggaccttgaaggccaaaggaccgattcttctactgatcaccgccatcttgtgggggttcgcgttcgtcgcgcagaccaccgcctcgagcgacatcgggccgttcaccttcaacgcctcgcgaaacatcatcggcgccgtgttcctgacgggcgtcatcgccatgcgcaaacggctcgggcacgaccaggccccgcagaaaagatgcggcgccgactcggcggcggtcggcccgacgacgggctacacgagaaagacgctcgtcatcgccggcgtcgcgtgcggcgtcgtgctgtttttcgcatcgtatctgcagcaggcgggcatcaccgcctaccctgacggcgcggccgcatcgagccgctcgggcttcgtgaccgccacgtacatgatcatggtcgcgctcatgggcgtcgttgtcggcaagaagacgcagcccatcgtgttcgtcgccgtggcggtgtcgatgctcggcatgtacctgctgtgcgtgcccgacggccttggcagcatctacctgggcgattggctcgtgctggcaagcgcgttcggctacgcgctccatatcatcgtgatcgaccacttcaccagcgtcgacggtgtgaggctgtcgcgtatacagctcatgacctcggccgccatcgcgctcgtgtgcgcgctcgcattcgagcaccccgatcccacggccatcgcggcagcgctcgtgccgatcctgtacgcgggcatctgctcggacggcatcgcgtacacgttccagatcatcgcgcagaagacgaccgaccccaccgtcgcctccatcctgatgagcctcgagtcggtgttcgccgcgatcggcggctggctcatcttgtcggagagcctgagcgcggtcgagttgctcggctgcgcgctcgtgttcgccgcggtcatgctcgcccaggtaccgcagttcgtcgaaaactcgctgcgcaagcgcgcgggacgcgcgagctaggagcaggtacagggcatcccgcacgcggagggcgcggtgcggatgcgctagtatggatgcagaagacagacagcaaaaaaagaatcgggaccacaacatgaaaatcggcatcatcggcgctatggaagtcgagatcgagcagctcaagcgtgccatcgggtctgggcgcgccgccgaatacgcgggcatggaattcttcgagggcacgctcggccagacgcccgtcgtcgtcgtgcggagcggcgtcggcaaggtcaacgcggcatgctgcgtgcagctgctcaccgaccgcttcgaggtgacgcacgtcatcaacaccggcgtgggcggcgcgctcgccgagggactgaccgtcggcgacatcgtcgtctcgaccgatgccgtacaccacgacgtggacgtggagaacctcggctacgccgcaggccaggtgccgggcatgcagcccgcgttcgaggccgacgagatgctgcgcgaggctgcactggcagcggtccatgcggcagcgcccgaggtcgcggcgcttgccgggcgcatcgcgagcggagatcagttcgtgtaccgcccgcagacaaaagagcgcatacgcgaggtgttcgacgccgcgtgctgcgagatggagggcgcggcgatagcgcaggcatgctccatcaacggcctgccgttcgtcatcgtgcgcgcgatcagcgacaacgccgacggctccgagcctgaggcctaccccgtcttcgaggagaaggcggcgcggcactgcgcggctatcgtcgagcacatggtcggcacgggcttgcatggcgacctgaagtgaggcccggggcgttgcaccgcgagaagatacgcgccgagacgcttgcccgggcggcggagcgtgccgctgagcgcacgttcatccacaacccgctgctcgtgatatcggccatcgccgccttcgcgacgatgttcttcgtgccgccctcccccgcgtacctcgactacttcgactggcatacgctcgtgtgcctgttctgcatcctgtcggtgctctcggcaatcgactcgtgcggtctgctcgaatggacggcgcactccattgccgagcacgccaagagcacgcgcatgctcgtcgtcgccctcgtcgtggcgacgctcggctgctcgctcgtcctgtcgaacgacatgacgttgctaacggtgctcccgctcgcgttggtgctgctcaagtcggtgaaccgcgagcgcgaggttccgctcgcgttcatcttgatcacgctcatcgccaacctcggcgggatgctgctgccatttggcaacccacacaacctctacctgttctcggtgttcggggtcgacttctcgacgttcgtgctcgcgatggctgcgccgctcgtcgtctcggtggtgctgatactggtgtgctgcttgagcgtcaagcggagtgagttccactattcgaagccagagagcatcaagctgagcccgcggcacgtcgcgctgtacctcgtgctgttcgcaatctgcatcgccatcacgctcaacgccgtcaactacctgctgggcgccgtggtcgtgatcgtcgccctgtgcgttgatgaccaccaggcgttcgccaagaccgactacacgctcatcctgacgttcgtcttctttttcgtgttcacgggcaatatctcgaacattccagccgtgagcagcttcttcgagatgctgctcggaacgttcggggtgtttttgacaacgctcgtgagcagccaggtcatcagcaacctgcccgcggcgatcctcgtctcgcatttcagcgggaattgggccgccatcgcgctcggcgcgaacatcggcggaatcgggacgcccatctcatcgctcgcgacgctcatcacgctgcggcagtaccagaagagcggactgggtcacaacgggaggtttctcgcacgcttcgaggcgttcaacttcgcgtttctcgtcgtgctcgccgccttcgagatgctggtcatgggcgtgcgctgagggcgagcggcgaagggcaggcggctctcgcgattcacgcacgggattggtggcagtgccacgttttttgcgattcacgcacgggattggtggcagtgccacgctttgtgcgatttacgcacgggattggtggcagcgccacgcttctcgcgcggggcgggtcactcccagctgcagatttgctggtacttcgcgccctctgacgtgagctgcgactccatcaggcaatatgcgttcacgcgcgccgtgatgggatgtgccgagagcttctccgcaagctcctgcatcgtctgttccgcgtcctccctggcacgcgacgaggcatggcgcacgagcgtgacatgcggaacgaacgcgcggcgctcgagctccacgccgagcctggccattttgtcggcgatctctttctgcaggtggtcgagctgcttagacggctgcgcgccgagccaccacgtcgtgctgtcggggctcttgccgtgcgacccgaacgtgtcgacacggtcgaacaccaggtcgaagttcagcctgctctggacatcgtcgagcacatcctcgaccgcgacgaggtcgtcttcgtcgatctcgccgaggaacacgagcgtgaggtgcatgttctccgcaggcacgggaacgcccgtctcgagcgcctcgcacagccgcctttgcacctcggcaatctgctcgacgatgtcctcttcaaacgaaatcgcgataaacagcctcatcggcttcctccttcaccaagaaaaaaaatgagacgatacccacggcccctcgtgtcaacatgagacgatacccacggggatgtgcggacaatttccgatacactctatcccgccgccgccgtcgaccgcctg

SEQ ID NO: 4599 - DNA, 7914 bp, Unknown
  16S sequences of unknown bacteria
tttgccatgctgtcccccctttgcacaaggggggcttttctttgccctgcggcattgggccaggactgcacccaggctttttccggcaaagccggagcacccgggccgaacaacgcataaagccggggagagcatgggagtggcggctcgccacccaggactgcacccaggctttttccggcaaggccggagcacctgggccgaacaacgcataaagccggggagagcatgggagtggcggctcgccacccaggactgcacccaggctttttccggcaaggccggagcacctgggccgaacaacgcataaagccggggagagcatgggtgcagcgtcacgctgcccgcagaatgtttcgagattataaactcatgattgaaaatcgtaacaaagtttagtataatttaaataatatctcacaggagaggggagagcggcttgaagaaacggacacggctgggggcgtttttctgtgccctgagcctgagtcttgccatgctggcggggtgcggaaaccagacggagccgtcgctgccatcccaggcccatgagccggaagagcccatggcccgggaggacagcatcatcatcgccaccatgagcgagccgccctctctgtctcccaccggccacagctcgattgcgggggattatatgaacctgctcacttacagcaccctgttccgcctggatatggagatgaatccccagccccatctggtggaggaatatgaggcggtgaacgacaccctgtggcggttcaaactgcgggaaggggtgcagttccacgacggcaccaccctgacggcccgggatgtgaaggcctctttggattgggccaagtcctttccccaggtgaagcggtacaccgacagcgtccaggaagtgcaggtggtggacgaatacacctttgagatcaaaaccgcctggccctcggccacactcatcagcgatctcagcttccacgccaattccatcctgcccaagcacctcattgacagcggcaacgacttcagcaaaaacccggtgggcagcggcccttatcggttccgcacctgggtgctgggggaccggctggagtttgaggccttttccgattatttcctgggggaaccggccatctcccatatggtctggaagatcatcccggaaggggaggagcgcaccgcggccctggaaaatggggatgtggacttcctcatggatgtggagaacaccgattaccagcggctgacccagaatgaggggatcgaagtcaccgagtttctgtccaccggccccacctggctgatgctgaacaacgaagtggccggtctggataatatctgggtgcgccgggccatcaacgccgccatcgaccgggaagcggtgatcgatcaggctctgggcgggctgggccaggcggccatcggccaggcccccttcaatctgccgggttacagccaggagaacgcccaggggtatgaccttccgctggcccgggagtatctggagcgttccggggtggaggcccaggacatcgggctgagcatcatctgttccagcgataccaaacgccgggcggcccaggtgatcgtgcagaacctggcggagatcggcattgaggccaaggtggagagcatggatctggccacctatctggccaccaccacccagggcaattattccggggccatcggcggctacaccaccagtaccatgctggggtatatgacggcggtattccattccaagtccatcggttccaccaacaagacgctgctgcgcaatgatgagctggacgctttgatcgaccaggcccaggagaccaccgaccgggcgcagcggatcgctattttggagcaggcctgtgctttggccaacagtctttgcacccaggcgcccctgtatcagccggtggagctgcgggcttacaagaaggggctgcaaggggtggaggtgggccccagcggcaagctgtattttgaaaacatttcctggccagcgtgacgctggacccatactctccccggctgtatgcgcccgtggcccgggtgctccggccttgccggaaggggccgggttgcagtcctggctggttgctggttgtatttgccttggctggttgtatgcaatcgggcaaagaaaagccccccttgtgcaaaggggggacagaccgctgaaggcggtcaggggggattgtgaagccgggcaagcatcctcagcctggttctgtgactgggtgcgggagcacaatacgacggcccaggcactgggccgtcatcaggaaggaataagcgaatatggaagcattgaaagaaccactgaaagagattctttgccgggaaggggcggaaaaatggggcgtagccgatttttctgcccttttgccttatggttttccccggggggtgtcggtggcggtgagtctgccccggcacatggtggaggagctgaaagaaggccccacccgggaatactattatttatataaggagctgaacgcacggctggaccggatcatcaccgccggggcccggttcctggagggcatgggctatgagagccgggccatcaccagcgatcatacccagttcatcgacccgtaccgttcggtgctgccacacaagacggcggcccggctggcggggctggggcgcatcggcaaaaacggcctgctgatcaccccggaatatggggcggcggtgcgtctttccacccttctgaccaaggcgcccctgacgccggacaaacccctggagggagaagtctgcggggattgccgcctgtgcgctgagatttgccccgccggggctttgcacggggagagctggagggaggggaaggaccgggatgagatcctggatgctcccacttgctttgcctgccagaaggaacagatgatgtcccgctttggtctggacagcgatctctgcggccgctgctttgcggtatgtccctacactaggcaagcgaactgaggtcggttggatgccgcagggtaaagaaagttatgggtccagcgtcacgctggacccatactctccccggctgtatgcgttgtttggcctgagtgctccggccttgccggaaggggccgggttacagtcctggctggttgctggttgtatttgctcgggcaaagagaggaacggcagcggggccaccccgcccccccttgtgcaaaggggggtggcggtctgcgccgctggggggattgagggcacctagccagaaaccccacacccggcagctggtatctatcatatagctgagtgctgtcaatcccccctgaccaccttcggcggtctgtcccccctttgcacaaggggggtggcgagccgccacggccataccctcttcgcctgagcaaatacaaccagacaaggcaaagaaagttatgggcccagcgtcacgctggcgctccgctggtataagtcagcccttttctgcgtaagatgcagggaaggggggagaaggatggaaaaaagctgccgtttgttcgacctgggggacaaggaagtcatcgaccttcagagcggtgcccggctgggctatatctatgacgccgagatcgatctggaaaccggccagatccgctcttttttcaccccgggaagggctcgcctcttcggcctgctgggccgggaagaggacgcctgcatcccctgggagaatgtggagaaaatcggcgatgacatcatcctggtgcgccgcctgcccgctctgccgtcgctgccgccgtcccgccggagcggccatcgccgcaggttctagggaaaaatgaaaaattttcttgcaattctggtatctttgtgatatcctaatatggctaaaacgcacattgcgtctccggcgcccggtgccctgcggggccgcgccgaagggagcgcaatggagggcaaaccaaaaggaggaaattgaaaatggcagtaatttctatgaagcagcttctggaagccggcgtccatttcggccaccagacaagaagatggaaccccaagatggcgcagtacatcttcaccgagagaaacggcatctatatcatcgacctgcagaagacagtgaaaaagctggaagaggcttatttctttgtccgtgatgtggccgccgctggggacagcgtcctcttcgttggcaccaagaagcaggctcaggaagccgtgaaggaagaagccgagcgctgcggccagttctatgtgaacgctcgttggctgggcggtatgctcacaaacttcaagaccatgcgccgccgcatcgaccgtctgaatcagctgaagaagatggaagaggacggcactttcaacctgcttcccaagaaggaagttgtcaagctgaagctggaaatcgaaaagctggagaaatacctgggcggcgtgaaggaaatgaagaagctgcctggcgctctgttcgtcatcgatccccggaaggaaaagaacgccatcgccgaagcccgcaagctgggcgtgcccatcgtggccatcgtggacaccaactgcgatcccgatgaagtggattatgtcatccccggcaacgacgacgccatccgcgccatcaagctgatcagccagaccatggccagcgctgtgctggaaggccgtcagggcgagcagctggaagtcaccgacgaggctgtcaaggccgaagagggcgaagtggtggacgagacccccagagctcctcagaagagagcttccaagaccgctgaagagatcgccaatcagtaagaaattatagttcttctcccgggcctttgtggctgtggggaatggacagaagattgacggaaaagggcaaattgccctgatatcaataaaatcgcaaaaatccgcgacctgtgcgtggatttttgcaccgctcaaggggcaagtgtatgtgcaaggctgcacgcaggcccttgggaaacccgaacaaggggcttgccgcttgttcggcctgagtcaagcccgcaaccatgcgggcttaactggggtgttatacaggatagaacaggggaaattttccctggataccagagctatggaggaatgaaaaatggcatttactgcgaaggatgtccagaatctgcgcgagcgcaccggcgccggcatgatggattgcaagaaagctctcaccgcctctgacggtgatttcgataaggccgtagagttcctgcgggaaaagggcctggccgctgccgccaagaaggctggccgtgtggctgctgaaggcatggtgtatgccggcgtgtgcgaagagtgcggcgtgggcgccatggtggaagtcaacagcgagaccgactttgttgccaagaacgaagtgttccagaagttcgtcaaggacctggccactgtggttatgaaggagaaccccgctgatctggaggctctgaaggcctgccagtatcccgaagagggcaagaccgttgccgaagtgctcaccgagaaggtggccaccatcggcgagaacatccagatccgccgtttcgtccgtttctgcgaaggcactcagaatgtggcttatatgcacatgggcggcaagatcggcgtgctggttgctctggaagtttccgacaacctgaagggcaacgccgctgtcaacgagctgggccacgatgtgtgcatgcagatcgctgccatgaatccccagtatctgaaccgggacagcgtgcctgctgaagtggtggagcacgagaaggagatcctgatggctcagaccatcaacgagggcaagcccgaagctgtggcccagaagatcgtgagtggccgcatcaacaagttcttcgaggagaactgcctggtggatcaggctttcgtcaaggagaacaagacctctgtttccaagtatgtggatgccaaggccaaggagctgggcggcaccatctccatcaagaacttcgtccgctttgagaagggcgagggcctggccaagagagaagacgacttcgccgccgaagtcgccgccatggccaagaaataagcggcgagccgccgcacccgtattgcgctgccgcgctgggcaatagaactgaaattgtgtaatgaaaaggcccccgattttcgggggcctttttgcacccagagcctgggcaatcgtccctctctttgcccaagtggacacaaccggcctgcatagaaaaagctccccgagaggggagcttttttcatgctttgccaggactgcaaaccggctcctaccgggtgatggtttatcacacccggagcaggggagctaacaacgcatccccaccggagacaggaacgggagtggaggcactccactagcgggacaggagtttttcgatctcccgggttttggcttcccggccgcagatcaaaagtttgccgtccaccatcagggaaggggaggtcataacccccagcttgacgatctccaccagatcttctaccttctccacattggcttccatccccagattgcgcagggcctcctgggtgttttcatataaccggtcgcatttgtcgcagccggtgccgatcactttgatttccatttgtattgcttcatctcctttcagggccagagccttcgctgcggcgaaggctggcccagtgcctgggccgtcatactctctttgcccaagcagacacaaccggcctttctggggcactctgccaggattgcaccaaggctctttccaggcgtggcccgccacgcctggagcaccgaggaatgacagcgcatacagccggggagagtatgggtgcagcgtcacgctgcctagtttttcagttccattttggcatcggtgtgattctgccaggcctccatgatcttcttgatgatctggggcccgatgcgggagataaacaccagctgactccgttcgtgggcatcgcagggcgcatgatcgatgcggtctcccaccacatccacctggttccagccctcttccaaatggaaaaagcccttgatccggtaagcatggggcagtacctcctggagaatcgcatccagagtctcctgcttcatcaccccgtcaaaccacagggaaatggtcttgggcttcgtttcttccgtgttggtggtctcttcgccctcacaccaggtgtattgcagcagatcctcgcccaggaaggacaggtccagatccccttgggtgcaggtacggatggggcaccgggggttgatcttccggatggcctctttcagctcttccatcttctccggcccgatgagatctaccttggtcaccaccgccagatgacagtgcttcagctgccgctccaccgtctccatgtcccggagctgctccatgaagttgacagcgtcgatcaggcaaatggccccctggaaatcatactgatctccgcccaattccttggccgcgtccagaatctcctggtagttggagggatcgcccaggccggagctttccacaaacaggtaatccaggttctgcttggccatgtccgccagggcctggacaaaggacagcttcaggcaggagcagaagatggagccacggttgatctccaccatctccacatccccccgctggaggatctggccgtcgatgcccagtttgccgaattcgttctggatgacacccacccggcggccctccagagcggtgagcagccggagaagcagggtggtttttcccgagccgagaaaaccggtgagcacatacagccgggtcttgccacccatcggagagggcagcacaggggctttgtcctccttcaaagcggccagagcgtcgatcagctcctggatcaccggctggttcagccggtaacggacccaccggccatcccggcggctggtcaccagctgcgcatcgcacaggaccttcatatgatgggaaagagtgggctggcgcatatcaaaatgctccagaatcttgcaggcacacatctcgttgccgcggagcatggtgagaatctggccccgaacccggcaccggcctcgacggtgcccacgtcgtcatt

SEQ ID NO: 4600 - DNA, 3190 bp, Unknown
  16S sequences of unknown bacteria
ggacgggcgctggcccagtcacagccggccagatcgcgcaggaaggcgtcgctgacgggcagatcgaactctctgcccaactgacgccagatgccctgatagacacgctcggtatcaaacagcgtgccgtccatgtcaaagatgacggcgttcatccttccaccttcttttccaaggcgtaatggaagaattcgcggacctcatccatcgtgtcgaagagcgcgacgctcacggtatcgcccatggcgctggccagggcggcagggagacgctgcatcatcttgagctgatcgtggtagcggttgctgatctcaaaatcgctgtgggcatagtgcacattgtcccggcgtccggcaaacgcgcagctgcggcggcggtgcggttcgatcagcacgctgtcattgatcatgaccgaagcccagatgtcgtaaatatccagatcgttggcgtaattgatcatatcaggcaggaagccgcccggcgggcgcatgttgacttccaggccgagaatatcgcctgcagcgcccagtccctcacggtcttcgcgcaaccggaaaaactcgaagtggaagaagcggctgcgggtatcgaaggcctgcacgcagcgggtgccgatgtccatgatctcctgcgggatgtcgatgagcgaataaccgccgatgctgtccgatgtgttgaccgactccatgatggagcccacatagtgatgggatgtcgcaaactgcacttccttgcggctgttggcgatgccatcgaaggtgaagcagtccccaggcacatattcctccaggatcatcgcttcgctgaagccctgcgcaaacagcgcgcgcagctcttgctcatcatgcagcttatgcgtgtttgaggcgcctacgccgacatccggcttgcagatgaggggatagccatagcgctgtgcgaagccgagcgcgtcatcgatgctgccggccatctgccagcgggcacagggaatgcctgcctgcgcatagaaatgcttcatgcgggatttggactgaaagtccgcgatgcgatcgatggtgatgccggtcgtgatgtgaaagtcctgacgcagccgggcatcgagcgaaagccagtattcgttgttggattccacccagtcgatcttgccgtagcggtaggtgaaatagcccatggcacggaccatctcgtcgtagttttccatcgaggagacgacatagcagtcgtcgatatattcacgaagctcccggcgcaggctgtcataaggacagtcgacgatcgcgagcaccgtggcgccgtgccgcttcaggccgcggcagaacatccagtaattttccggaaagttcggcgaaacaaaaacgaaattcataaatccatccacctttcccagtctgtatcattataaagcaattcagcgggaatttggggaaaagatatcgaatttcgtcttttcttatcgtctgagcagcgcatgctgaagcgcgatgatggtcttggcatccatgatcgccccatgatccagcatgtcctgcgcctcatccagggagatccactgcagggtgatgtcctcgtcaggatccatcgggcgcggatcttgaagcggcatgggagaaatggcctcatacagatgcagcagctcgctgcagatgccgggcgaggggtaaacggaacagaggtggcgcagcgcgtcgcagcggaaaccggcttcctcctccagctcgcgtcttgcgcagcagtcaggagattcaccgctttccagcttgccggccggaatttccagcagtgttcgtcctgcgccatggcggtattgcctgaccagcaggatctgctcatcgcgcatcagcaggatggccgctccgccgggatggcggatgagatcgcgctgcgcgctgacgccatgatccagcagtacctgatcgctgtatagcgagaagatgtctcctgtccagatcatcgtcgaggaaagcagcttcattgctcgaccgtctcctgaatgccggcggcgatggcagaggccatttcctcctggaatgactcgtcgcacagcttggccagatcggcatcgtccgtgatgaagcccagctccagcagcatggcaggcaccggattgagcgccagcacatgcagcgatgtataatctgcctcattgatgccgcggtcgatggaataatcgagctgggcgagctgttcatggatggccgatgcgatctttgcggtatcattgcccggggtcacataggtctcgaagccgcgggcgccgtcattgtaaaaatcagtggcattcagatggaaggagatgaaataatccgcctcttcctctacgcccagatcgacgcgcgcctgcaaatcggcggcgttgtcctgcggccagctgacgttgtcatccgtccgggagtagacgatccggtaaccgagatcctccaacagcgcaccggtcttcagcgcaatctgcagcgtgacatctttttcgttgacgcgctcatcccagctcgtcgatccgccgtcatatccgccatgtccggcatcgatgaggatcgtcgtctgttcttcctcttgcggggagatgaaggaataaacactgtctgctttctgcgggcgcggcgcgctgttctgtgtgtaaggcagaaatatgctgatcagcaggacgctgagcatgcatgccagcagagacatgtgatagatcttgttgttgatgtacataaaaatcacctgacgtatcataaacaaaaaaagtcacaggaaggtcgtaaaaatatgtgaaaaaatgggaaaactagtctgcggtttctgcgtgaagcgaaggaaactgtccatactaagggcaggagtgatatgatgaatgaaaaaaagctgaaagagaccgcggcccgtcatgcgccggccgcgcagaaaggcaggcatatcgttacggcgtttgtcagcggcgggctcatcggcgcgttcggccagctgctgctcgtcgtctaccagcagctgctccatctggatcatgatcaggcgctggcgatgatgtcggtgagcgtgatgctcatcgcggcgctcatgagcggactgggcagatatgatggactggcgcagaagtgcggagcaggcatgttcatccccatctgcggctttgccaattcactggcgtccagcgcgctggaaggaaagagcgaagggctcgtctatggcatcggcagcggcatgttccggctggccgggaccgtgc

SEQ ID NO: 4601 - DNA, 2033 bp, Unknown
  16S sequences of unknown bacteria
gcagcagccgcagaccccgacccccgcgcagcccagccagtcccagggcacgtccaccgattatattctgcccaccagcaacaccgcgcttgtcagctatgacacgctgcgtcccctctcggattggcagctgcgcctggcgcgcaatgaaatttacgcccgccacggccgccggttcaatgacgcccagctacaggcctattttgacggtaaaagctggtaccacggcaccatcgcgccggacgcctttgacgccagcgttttgaatgacacggagcttgccaatatcgcgcgcatccaggaagtggaggcgcagcgcaaatgagaaagcttctttgcctcatccttacggccctgctgctctgctttgcaggctgcggccaaacaagcggcagccccgctgctgcacctgcagacccggtcgagaagaccggctcccccgcaagcgaaccggaggcggacacgccggacgtgccggagacacctgtgtcaaacggccgcaccgtcgtcctcgatccgggccaccaggcagggggcgacgccgggcaggagcctatcggccccggcgccagccagatgaaagccaaggtcgccaccgggactcagagcagcttcacgggccttgcagaataccaactgactctggacatcgccctgcagctggaacaggtcctgctggagcggggctacaccgtctacctgacccggcgggataatgagaccaccatcagcaacgccgagcgggcacaatatgccagccaagtcggtggggagatcctcgtgcggctgcatgccaacggcagcacggacccggcagcgaacggcgcaatgaccatctgccagacgccggaaaatccctaccaaagctgctacgacgcttcgcatctgctctcccagcacctgctggacgcctactgtgccgccaccggctttgcaagccagggcatctgggagacagacacgatgactggcatcaactggtgcagcatccccagcaccatcgtcgaaatgggctatatgacaaacgaaagtgatgacgcccagatggccgacccggccttccaggaaaccatggtccaggccctagccgacggtatcgacacctactttgccgaagcggataagaccttcgcctaaccatttataaaccttcataaaaatacggcttgcagcccggtttaggagctgcaagccgtatttttatgcttttcttacattttatccggcgcctggaagcccagcaggtcgatacaggtctccaaaatggattttgccagcgcgatcagggccagataaccctggcgcttctcagcgtcttcctccgtcaggatgcgggtctcgtggtagaagctgttgacatagcctgccagctcgtagatatacgcgcaaatcaaattcggcgctaggtcgcggtaagcggcggtcagctggtcggcaaagcgggtgatgcccagcatcaggttccgggcgctgtcattctccggcagtgcgatgggcagctggctagcctcgacaccggccttgtccaggatcgacttgacccggacgatggtatagaggatatacggcccagtgttgccctcaaaggcggagaagcggtccaggtcaaagatatagtccttcgtcggttggttgcacaaatcgccgtatttcagcgcggccagggcaatcatctccgccgtgcggcgcatctgggccggttcgacgacctggttgtcctcgatcttgtgatagacgaagtccgtcgtctcttcgatgagccggtccagccgcatgacgccgccctcgcgggtcttgaagggctttccgtccttgccgttcatcgtgccaaagcccaagaattgcagcttcgtctccggctttacgatctggcccttgcgggcagcgcggaacacctgctcaaagtgcaggctctggcgcttatcgacgacatagagcacctcatccggggcaaagtcctgcatccgctgcactagggtcgccaggtccgtcgtggcgtaaagcgtcgcgccgtcggacttgacgaggatgca

SEQ ID NO: 4602 - DNA, 3409 bp, Unknown
  16S sequences of unknown bacteria
ctgcaatacagggtaatgcaccaatattgggtgaaatcaatatcgccgacatccaggtcaatttgattcaattctttggttgtaaccaactctttcagcttcacgtaaggcgaagcattcgctgctgcattcagcgcctcgtcgatcttccggttatcctcgttgaaatccgttcggagtactcgatcggagggttcccattggtttaagtgataattttttgtatagttcaagttgatttctcctttttgtagtctgattgtagggtttttttcaaaaaaagccctacacttattgtgtagggcagggcgaatgttgtacggttcaaggcaacaaaaggacaaattaatggggcggaaagcgaccgcagagcagcctgtgcgccggggaaaagcaatgctgagattggctggctttgatgggaagaaaatgtaaaatccggattgcaaagtggtatcctatccgctatactgaaaactgcagttttagcggactgcgatgaaatatgcaaggaggccgaacgattatgacgccgatcacattttatattccctgcctcttcggtttggaggcgctggtgggcgacgaactgcgccgcctgcatttgaaggatattcgcgtggaaaacggtcatgtgctgtgctgcggcacagtggcggacgtggcgcggctcaatttgaacttacgctgcggcgaacgggtactggtggtgctgggcgcgttcacggcatcttcctttgacgcgctttttgagcagacaaaagccctgccctgggagaactggattcccagggacggcgcgttcccggtcaagggatacagcctggacagcacgctgcactcggtgcccgactgccagaagattatcaaaaaagctgtggccacccggctgggtgcaaagtacggtaccgggcagcttccagagacgggcgcaaaataccagatccagttcggcatgatgaacgaccgcacagcgctgtttctggatacttccggcgcagggctgtacaagcggggttaccgggctgtgggcgtgcgcgcgccgctgcgggaaacactggcggcggccatggtgacgcttgcgcgtttccggggcaaagaccctttctgcgaccccttctgcggcagcggaaccatcgccattgaagcggcgctgatcgccaaaaaccgtgcgccgggactggatcgcagctttgacgcgcagaaatggaaaaccgtacccggtgaaagctggatggatgcggcagaagaggccatggaccaggaatacgatggtaattacgatatctggggcggtgacagcgaccccaaagccattgccatagcccgcagcaacgccgagaaggcgggtgtggaagatctggtgcgttttgaggtggcggatgccacggccttttcccgcagcagcgattatggccagctggtaacgaatccgccctacggcgaacggctgctggagcaggaggaagccgggcggctttaccgcgcttttgggcaggccgcagcagcgctgccggaaaaatggcgggtgtatatcctgtcctcccatccggagtttgaggcatgctacggcagcctggcggccaaaaagcgtaagctgtacaacggtatgatcaagtgcgatctgtttatgtattaccgctgacccggcgggcggaaagaggaagacaaccgtgaagcacatctttatcatcaacccccgggcggggcgtaaaaacggcgccgcgcatctgatggatcagattgaagcgctgcggcgcgtccataacctgacctgtgagaccgtactgaccggacggcagggccatgctgaggaagtggcccgccgggctgcggagagcggggaagccgtccggctgtatgcctgcggcggagacgggacgctgaatgaagtcctcaacggtgcggccggggcggaccgggcggagatcacggtggtgcctacgggcaccggcaatgactttttgaaaaaattacggcgaagacgctgtgcgttttgaggatctggagcagctatggaacggtccgggccacgatctggatctgattgaatgcggcggacggctggctgctaccattgcctgcgttgggctggacgcccgggtggcggacgatgtgcaccgcttcagcaaagttttgcccgtcagcgggaaaatggcctatctggcttcagcgggggcaaatttttgcaagagcacaggccagcggatgatgatcacctgcggtgcgcaagctaccatcggggaatatgcgatggtgtgtgtctgcaacggccggtactacggcggcggttttatgcccgttgccgatgcccgtatggacgacgggcggttggacacgctgatcgtgcggcgcgtaagccgggcgaaattcctgcgcctggctccggcctatgcccggggtgaggcgtggcgcttcccggatgcagtgcggcgggtgcagaccaactccgtgcgtatccagagcagggagccgttggcgctgagcctggacggggagattcagtataagacggacgtgcagatgaccctgagtgcaaaaaagctgcacttttttgcgccggtgggggcctcctgcaatcgtacggcgcggcgccggctcgacaaatagcctgacacgggtggcagtgtgtcgaaagctttagtcaaagtatgtcaaaatacacaaagaagttttttaaaatctgggatatttttctccatatttctcttgcataaatgaaggatttgatttatgataataccagcattagcactctggcgtgttgagtgctaatgctggtatcgcctcttatgggcgagaaacattgtgttaatacatgctcattatataaggaggaactcaaaatgaaactcaatccgttggctgaccgtgttgtgctgaagatggtcgaggtggaggaaaccaccaagggcggcctgatcctcaccggcaatgcaaaggaaaagccctctgtggcagaagtggtatccgttggccccggcggcatggtagacggcaatgaggtcaagatgaccgtcaagcccggcgacaaggtcatcaccagcaagtactccggcaccgaagtgaagatggacggcgtggaatacacgattgtacgtcagggcgacatcctggctattgtggaataacaacagttctgattaatgatcctgtaggaggtagattattatggcaaagattctcaaaagcaatgacgaagcccgcaaggctctggaagccggcgttgacaagctggccgatactgtcaaggtcaccctcggccccaagggccgcaatgtggtgctcgagcgcaaatacggttcccccctcatcaccaatgacggcgtgaccatcgccaaggagattgagctggaggatccctttgaaaacatgggcgctgctctggtgcgcgaagtttccaccaaga

SEQ ID NO: 4603 - DNA, 2164 bp, Unknown
  16S sequences of unknown bacteria
ggattgatccgcttacaagcacgatcagccacgtcaccaccgccgctttggataacgtttcccagatcccgctcatcgttgcgccctcctcggctcccgggccgtcattccttccagattcatgtcccgaagtcccaccgcgtaataatctgttccgtcatgctcgatccgcgtctttacccacgtttcacagaccttcaactcgatcacgcttccgcaaacgaactgcgtttcttcgtctaactcataacgcccacgctcgtttttgtgcagcttaccttctttcctgctcatttttcttaatcctccaagattaaaatttgttgtttatcttctcggctttcgccgtttcgaccgctattattccccgtcaggcgtttgtgcccgcgcgatttgctcttttacctcccaatacgtttcctcgacttctatcgtatagtgcgttattttgcgtatcgtcatatgcgcttcaatacaaagacttgccctctctccttcgttgaaaactgcctccaaaaacactatgttgaccaacaccttccgccccgtgtcttttgacgtcacttcgataaatccttgcatttctaccctcttttttgcgttctgcgcgccgctttcctttgcgcgggtgattcttcgaccgctatcgcttccgtcgcgtctgcttaaaattccaccgatatatcactattgtagtttcaactactattgtaattatacgcttgtagattcgctttgtcaactactattgtaattttttttaattttttttatttctaattgtactaaaaaatttttttagctatcatgtttataggagataccactatgttcagtcaaagattaaaaatattaagaaaaagttttgatctatcacaggcaaaatttgcaaaagaaatcggtttttctcaatctgcaatagcctcatgggaaaatgaaaccagagaacccgggataaatgcacttataaaaatagcccaatatttcaatacctcggtagattatcttatcggattgcccaccaccgcgataacgccagaaaagcccgccccgcttccacccgatacgcaagagcttgtcaatatttatcaggcgctttcccctgctcaccgttcgcaaattctcgaatatgcccgttattttgccgaaaaatccggcgcagcttctacccgccgaaaagcataaaacagaaaaaaagtggttatttccattttggaaataaccataaaggagaaacccatggaaaccaaactaaaactttttaacgaaaagactgtccgcaccgtatggaacgccgacgaggaagaatggtatttctccgtcgtggacgtcgtggcgattctcacggacagcgtcgatccgaaacagtacatcaaaaaaatgcgcagtcgtgatccagagctatccagcaagtggggtacaatttgtacccccgttgaaatgctcgggcttgacggccgacgtcgaaaggtacaggccgccaccacaaaaggcgtcctgcgcctggtgcagtcgatcccttctccgaaagccgagccgttcaaaatgtggctggcgcaggtcggcgcggaacgcctggatgaaattgctgatcctgaaaaggcaattcaacgcggcgcggcttactatcgggaaaaaggatattcggacgagtggatccgtcagcggcttcgcaccattgagatcagaaagaagctcaccgacgaatggagtgcccgcggcgttgaaacggatctcgaatacgcaatactcacaaacgacatgacgaaagcgtggtcgggactgtccgtgaaggaatacaaagcgctgaaaggattaaaaaaggaaagcctccgggacaacatgacagatctggaactcgttttcaatatgctggcagaggtaacgacgacgcggctctcccaaaaagaaaagcccgaaggattcgaggaaagccgaaaggtggcgaagaaaggcggtgcggcgacaaaacaagcgcggcaaagcattgaaaaagttattggcgaaaaaatcgtttcccctctgaacgcttctgaaaaggagaaactcgtcactgaaaaactgccggaaattcccgaccctaccgagccgaaagaatagccgcgaataacaaaagaaaagttgcgggattttattatataactaaataaaccgactatgttgt

SEQ ID NO: 4604 - DNA, 8881 bp, Unknown
  16S sequences of unknown bacteria
ccgccgtgctcctgctgcagggcgcgggcctcttccaggctgtgggcctcgtaggtgtgatcttccagattcttcttcgcacgctggtacaagccctcgtggacggcatccagcagcgaagcggcggactgctccagctgcgccagcggggcaaacgccttctcccggttatcccggcggaccatgcagcactgattctgctccagatccttcgggccgatctcgatgcgcagcggcacacccttcatctcccactgggcgcacttccagccgagggaattatcgctatcgtccagcttcgcgcggaacccagccgcctgcaggcggtccaacagcgcagcggcggcatccagcacgccgggcttatgctgcgccacggggacgacgacgatctgcaccggggcgatcttcgggggcagaaccaggccgttgttatcgccgtgggtcatgataatgccgccgatgagccgggtagagacgccccaggaggtctggtgcgggtggacccgctggttgttctggtcggtgaaggtgatatcaaaggccttggcgaagccgtcgccaaagtaatgggacgtaccggcctgcagggccttgcggtcgtgcatcatgcactcgatggtatacgttgcttccgcgccgttgaatttctctttttccgtcttgcggccgcgggtcacaggcatggccaggatattctcacagaagtcggcgtagacgttcagcatgcgctccgtctcttccttggcctcctgggctgtggcgtgcatggtgtggccctcctgccagaggaattcccggtgccgcaggaaggggcgggaggtcttctcccagcgcaggacgctacaccactggttatacatcttcggcaggtcccggtgggactggatgacgttgcggaaatgctcgcagaacagcgtctccgacgtgggacggatgcagtagcgctcttccaactggtcgctgccgcccatagtaacccaagcgcactccggggcaaagccctcgacgtggtccttctccttctgcaggagggattcggggatcagcatcggcatatagacattttccgcaccggtctctttaaacgcagcgtccatcagcttctggatattttcccagatcgcgtagccgtatgggcggtaaataaacatgcccttgatggaggaatagtcgatcagctccgcctttttgcatacgtctgtataccactgggcaaagtcaacctccatatcggtgatttgttccacttttttctcttttgccattgcgatttgccaccctttcggtttcattatggtgaacccaatattgtataataatatccgaatttcccgcgcaagtcaagcctacagggattggaaattctacgctccttttgcgcttttgggggtgttgttcgactatgctgtatgagcttgaggcacaaaatcagcacgctgtgcaaactggcgcaacaaaatcagagattttgactttcgcttattcgtcaatcatacagcactaggcttgcgcacttagcatcccacccactagccgccggtgaaagtgattttcccttgacttgcgcctgcagctgcaaactctgtgaggcttttgtgcgtctcagggggaaagcctgctgtcagtgcggcaggacaacactgcccagggccaagaccgcattgcggacgcagtccggacagctgcacagcggcgttcccgtctggacgcctttgaggtccttacaaatcgtcgcaccgctggtctgctggaacgcctgcagcagctgcttggcgatgcgaggcgtaccggtcccgccggtcagcgccccggcgaccaggaccgcgccgatcagcgccccgcaggtgctctccatgcagcccatcccggcggcaaaacccgccgtcagctgcagcagcgtgtcaagctccaccggcagctcgttttcaaacacttttacgacagactgggtacagttatacttccccgattttttcagttcggcagccagctccgcccgttcttcgatcgtcataacgcaacgctcctttttctatctagccggttttctatacggtccggcgcattttccttattataggccggtgcgcagcgggtgtcaatagcaggcagcgcggcctgtatagcaccgcggaaactgggtaaagctagcagcagatgcaggcgcgcccagtcaggctgggcacgccggaataaggaggaatatgacctttgcctgagatgttttgctttcagtgccagcagaccgctggcaacaagggctgcgtgcgcaccggcgtatgcggcaagcagccggataccgccgcactgcaggatgagctgatctgcgccctgatccagcttgccacagcagcccaggaccaccggacgccggagatcgaccgccttttgatggacggtctgttcaccacgctgaccaatgtcaattttgataacaccgccatcggtgcgtttctcgcccgggtccgggcagcgcaggcgcccttcggcacgccgtgcgagaccctcagcctctggaagggcgagacagaccttgtcagcctgcgctccaccttgctcttcggcatgaagggcatggcggcctacgcccatcatgctgcaaacctgggctattttgacgaggaggtctcggcctggttctaccggggcctgatggagataaaccgtagtcacaccgtcgcggaatggctggcgctgatcctggaatttggcaagatcaactaccagtgcatggcgctgctggaccgggccaataccgcatcgttcggccagccgtcgccggtcaaggtccggacggatatcaaaaaggggccgtttatcgtcgtctccggccacgatcttttagacctggcgcagctgctggagcagacggacggcaccggtgtccgtgtctacacccattgcgagatgctcccggcccatggctacccggagctgcggcgccatccgcagctggcaggaaatttcggcaccgcctggcagagccagcagaaggaatttgaaaatatccccgcgccgattctctttacgaccaactgcctgatgccgccccgccccagctaccaggaccgggtgtatacaacgtccgtcgtcggctatcccgggctgcagcacatcgccccggggcgagacgggaaaaaggacttttccgccctgatccgccaggcccagtcgctgggcggctacacccacgatcacgccatgagcggcatcaacggcggccatatgctgatgaccggttttgcccattacgcagtgctggagcaggcagacgcgatcattgcggcgatccgcagcggcgccatccgccgcatctatctggtcggcggctgcgacggcgcgcatccggggcggaattattacacggaattcgtcaaaaagacgccgatggacagcctggtcctgaccctggcctgcggcaaataccggtttaacgacctggatctcggcactgtcgcgggcatcccgcgtattctggacatgggccagtgcaacgacgcctacagcgccatccgcgtcgctctggcgctggcggacgcctttggctgctccatcaatgagctgccgctgacgctggtgctatcctggtatgagcagaaggccgtctgcattttgctgacgctgctggcgctgggcgtcaagcggatctatctggggccaacactgccggctttcctctccgagacggtcgtcaaaacattggtcgacgcctacgggctccagcccatcaccgcgccggagcaggatctggacgccatccagggccggggctgaggcagcatgcccagccattggcgcaaaaatgacggcaaagcccaacaaagcctatagataaaataggatattattttcctgcattccatgctacaatgaggacgataaaccagcgtcttacaggaggacggtgcggaaaaggaggcccggagatggaagaacaattgggaaagcggatcggcaccgcccggaaggaccggggcctgaccgtgcagcagttgacggaacagcttggcaccaatgcagcttacctgcgccagatcgagtgcggcgtcaagatgcccagcgtcggtttgctcgtcaggatctgcaatgcgctgcaggtctcgccggactatctgctgcaggacctgctggtggagaacgaagtcagcgagatgcgcgtgctcgaccggctttggcacaataccccgcccagtaagcagaagatgatccgtaccatgctgcaggccctgctggaagaacccggcagcgcgcagctggcatgacccctgcaacaaagccccaaaaaaccggaagcgaccgaatcgtatacggccgcttccgtgtttttgttttttatttggtcacttcccgccgcgttccatgaggtacgcccgcagaacggcggcttgggtcttgagatccgggatctcgccccggaggatttgctccgccaggtccgccagcggaacgctggtgacctctaaaaattcatccgcatccagctgctgcgcccccaggtgcaggcccttggctaggaacatatggatcgtctcatccgaatacgccggagccgggtagaagattccgaggctttcccagtgggaggccgtcagccccgtctcctcccgcagctcccgttgggcggccagcaaggggtcctcctgcttatcgttcagcttccccgccgggatctccgtgatgatccggtccaccggatagcggtactgccgctcgataatcacccgcccatcgtccgtcaccgggacgatgcacactgcgcccacatgacggatcagctcccgccgggccggcgcgccgttgggcagtcgcacctcgtcgcagtagacgtgcagtactgtgccgtccataatctggcgggaggcggtctgggtttcctttaattcgtgtccctcacgctgcattgcaaagcctcttttctgccccactgggcgttggattctgcgcatcattatacttcgcttctgccgagatcgcaagggaaaatccctgtcactcctccacgtccttcagccttgcagcaaagggtgtttccatggcgctttgcagcttggcccgctgcttgaactgggtaacattcatcgcgctctcacggaccgggcggatcgtcccagccccagcgacacagccgccggggcaggccataccctcgagcagatagccgttgcgcttgcctgccttggccatggccagcatcttgcggcactcccgcaggccgtcgccgtaatctgtcgggacctcccggtccggatccagctgcttgatcgtctcgacgacagccgctgcaacaccgccgccgacggcatagccccgccccatggcagagccctcgtgcatactctccgactcgtctgcctcgatctcggcggggacgatcttcttagcgtcgaacattccctgcagctcctcaaaggtcagcacatagtccacgtcggagcggacggagcgccggttcgcctccagctttttcgccgcgcaggggccgatgaagcagatctgcgcatccgggtgggccttcttgaccattcgggcggtgatgaccatgggtgtcagcgccatggagatataatccttaaactccgggaacagcttcttcgccatgaccgaccacgccgggcagcaggaggtgcccataaacggctgccgggccgggaccttctccaaaaagtcgcggctctcctcgatggtgcacaggtccgcaccgatggcaacctcgaccacatcgacaaagcccagttggcgcatggctgttttcagctgggcggagctgacattcttgccaaattggccgacaaacgctggcgccacacaggcataaatctcccgcccccgtttcatattattgataatctggaaaatctgactcttatcggcaatcgctgcaaacgggcaattcaccaggcacatgccacaggaaacacacttatcataattgatctttgcccgccccatctcatcagactcgatggcatccataccgcaggccgcggcgcagggccgctcgatcttgctgatggcatggtacgggcactggttcacgcaccggccgcacttgatgcatttgtcctggtcgatgacgcagtgcttgtccttatccaaagagatggcatccttggggcagacttgcatacacgggtgcgacagacagccctggcaattatccgtgatgcgcacctgcttcgtcgggcaggcgttgcaggcaaaggtgatgacattgaccagcggctcctcaaagaatttgtcatctgcctccgccgcctccttgatgccgtcgctaaccaggctcatctcactaacaggcttgagcggcaggccgcaggccagccgcagccgctgctggacgatcgcccgctccaggaaaatatcatgccggtggtgtgcgatctcaccgggcaagattttatagggaatccgatccacgcgggtatagtcgccaccctcataggccagcttggcaatctccgtaaagacactgcggcgaatctcatccaccgcgctatgcacacctctcacagccatccctccattttgcaagcattccttcattttatgtttcattcttaaacttcaactgcattatactgacttctgacataatgcgcaacatttccatcattaaatattttaatatctatatttatttaccgattcctagtgcattctcgtctcagttttccccacgagcggcgaaatatcagaaaatcttaagcttttccgctccgtgggctagagacagggccgcgaaaaaatgttataattagtattattattgaggtattccaaaccattcccatttcccggaaggagagagactatgccggataaaatcctcgtcgtcgatgacgagcaggagatcgcggacctggtcacattgtacctgcaaaatgacggctacgaggtctatacctgttatgatgcccacagcgccctggcgtacgtcgccaagatgcagctgcagctggcgattctcgacgtgatgctgccggatatgagcggctttgccctctgccagcagatccgccagacccatatgtttcccatcattatgctgacagccaagggcgaggacctggataagatcactggcctgaccctaggggccgacgactatatgaccaagccctttaacccgctggagctggtggcccgggtcaaaacccagctgcgccgctatacccgctacaatcccgccgggcaaccggatgcaccccagtgctacgactttgctgggctgaccatctgccgcgacagccgcaaatgcaccctctacgacgaagagctggcgctgacgcccatcgaatttgacatcctctggtacctatgcgcccaccggggcaaggtcatctcgtcagaggagctgtttgaggccgtctggcaggaaaaatacctcgataacaacaacaccgtcatggctcacatcgcccggctgcgggaaaagctgcacgagccgagccgtaagccgaaatttatcaagaccgtctggggggtggggtataccattgcataacgatcgcaaacgcctgatccaaagccagctctcccgcaagctgacgatgcgctttttgctctggacactggcttacctgctggtcctctttggcgggtattttatggccgcgtttttctgctcacagcggacatggtacccggcagagccgctatataatattttgaagtgcgccgagcactttgccccatttctgctcgtcgtgctcatttttctcggtgtattttttatcactcggcggtttctgcgcctggcgctgcgctatcttgataccgtcaccctggcggcagagcagctggcgacgcagccggaagcccccatccgcctgccggacgctctgcacgagacgcagatggagctgaacctcgcccgggaacacgccttaaacgctgcccaccaggcaaaggaggctgagcagcggaaaaatgacctggtcatctacctggcccacgacctgaaaacgccgctgaccagtgtcatcggctatctgaccctgctgcgggacgagccggacctcagcccggccatgcgggccaaatataccggcatcgccctgagcaaagcggaacggctggaggggctgatcaacgaattttttgagatcacccgctttaacctggcccatctggagctggacctgcagccggtgaacctgacacgcctgctggaacagagcacgtttgaatttgcgccggtgctggcggagaagcagctcacctggcgcctacagcttacgccggatgtgccgctccactgcgacccggataagctgcagcgagttttcgacaatctcttccgcaatgccgtcaactacagctatccgggcacggagatctccgtctgcctcacccggtatgtcggcggtgtccgtgtcctggtgcaaaaccggggcgcaacgatcccggaagagaagctgacgcggatcttcagccagttcttccgcctggacaccgcccggcgcagcgataccggcggcgcgggcctgggcctggccatcgccaagaagattgtcgaggcccacggcggctgtatcaccgcccgcagcgccgacgaaacggtgacatttatcgtctccttgccggagacttgtcagaaaaacgtatgatttgcgcaaggcaatcataagcatcgcggcagaaaaaacgaaagcaaaatttacctcgcgctggtatgctaaaactataccggcgcgagggcgcgtgtcaaaaaagatttttgacacgcttcaaacgcgacccgcttcgctgggctcgcgtttgagggggcttgcaccctgctgcgcgcataatttccacgccgttggcgcggaaattccacacttgcagggcgtaaagagtttttcccgacgtacacgccgccggaaaaaacagattg

SEQ ID NO: 4605 - DNA, 5181 bp, Unknown
  16S sequences of unknown bacteria
ttgtcaagggggaagcccggtcccccttgaccgtattttggttccttttgtacgcacaaaaggaacgccccggcggcgagccgtaccggttttgcaccctgcaaaatcaatgccccgccgctaggcgaccacaatcttggcctaatatttcttttacctacttttcatcacagaaaagtaggcccccgccgggtaggcgcgctaactaagccttgcacaaggctccgccccgccgaaggcgagatgaaactttggcataatttgtgccatcaatccctccggctcattttattcgccacctccctttacacaagggaggctttcgccgacaggcgactgcaaaccggcctccgccgggtaggcgagatgaaataagggcatgaaaaagctgcccggaggcagcaattcccaaaaatcagattttgataaccggcgtggtgtattcactgccgcagggggccagccccggggtgaaagcgtgatacaggtcggcggcccgggtttccagcgccgcaaagagggcagccgtttcaccggccttttccagctccgccagcgaggctgaaagcggtagggtatggcaccctttggcccgattcaggatctccgcccccttggcggtaaagcccagcacccgcaggtagggcggctccacagccgaaagcccggcgggcagctccagcatggccgccagcaggacccgccttaaacgcgcgtgggtgtagcgcttggttttggcttcggccagcagctcctcggtggtttttgccgtgcgcgatgcccggtataggcggtgctccagtccctcggtgacatccggcagagcggcatagtcggtttcggtcatcgcgcgcaggtgtgcaagaaatgcccgctcccaaagctccagttgggggagggccccccgctgccgggccagctccagctgttcggccatggccgggggcagggaggaggagatatcctggccggtaaggaaacgctgccgcagctgggaggccgaggaaaaatcggtatccggctcggcggcatcgtgggaggcgccctgccgggagatggtaaggggttggatattggagcccagttggcggagggcccggagatactcgataccgaggatgttattgggggaggagagcaggccggcatcttccccgagaagggaatgaacggcggcctgccgggctgctgcaaagggcaggcccttttgcagatggggggccagggcggccggaaggtcgggggaatccagggcggcggcgaccgaccgcagggcggccagttccccgcactcactgccaaagatgagggaatccaccgcgccaagggcggccagactggccatggcgccccccgcaaagtgctgggcggtggaaacggcatagggcagcggcagctggaggaccagatccaccccactggaaagggcggcggcggcccggtactgccaggggcagagggcgggctccccgcgttggacaaaattgccgctgaggatggccacgatatgggtggccccctgctgccgggcagcctgaacgggcagcagatggccccggtgcagcgggttccattcggcgatgatggcggtgacctgcatggatcggactcctttcggtggggggatttattccaaaatggatggcggttttataaaaatcaaaacggatgagggccggaactttcagcgtgcctctagggggccggaactttcagatgcttcaaagcagggaaggagctttccctccgcacaggggatgagtggggcgcgaaaaggcccgcagggccggcggcgcagccgccgtgggcggggcgaagccccgccaagcccgccgcaggcgggctgccctgcgggccgtatcccggattttttgcgggtttgggaaggggcagaaaggggctggcagggactggcctgggttcgggcttttggggtgagtttgaagccgggcgagagatttgcacggaccgggccggaaaagcgggaaaaacgcgcagtagtcaaatgacacaaaggagaagaaatgcaatgggaggcatttgtttgttatagcaaatgtgatatgacagaattgcaaaaaagtcataaatatttgcgcaggtcattgacaaagacctttgattccaataatataaaatggacaaaaaggtgtcaagccccagcgaggcttggtgaaaaatgacgcaaaaggagatgatacacggatgaatattctggtgatcaacgcaggcagctcttccctgaaatatcagctgatccgcatggaagacgagtcgatcctgtgcaagggcgtttgcgagcgcataggcatagacggcaagtacagctacaaggccatgaatggctataaagtggaaaaggaagccgacctctttacccacaaggacgcctttgatgtgatcctgcacgagatggtgcagggagaaggtcatgttattgacagcgtgaacgagatagcagcgataggccaccgtgtgacccatggcggggataaattctcccactcggtactggtggatgaagcgaccattgacgccattgccaatatgcgtgatatcagcccgctgcacaatccgccccaggcggcgactatccgggcctgccgcaccgtctttggcgaggcgctgccgatggcggcggtctttgatacggcattccatgccactatgccgcccaaggcttacacctttgcgatcccctacaagtactacgaggagcacggggtgcgccgctacggcttccacggtaccagtcaccggtatgtcagcggccgcatggcggagctgctgggcgagatgccccaccggctcatcacctgtcaccttggcaacggcagttcgctggcggccattaaggatggcaaggtagtggatacctcgatgggctttactccgctggatggcattataatgggtacccgctgcggcagcatcgatccttccatcgtttcctacattgccaacctggaaaacctgcatgagcgcgggatgaatcgtctgctgaacaatgaatccggcctgctgggtgtttccggggtttccagtgacttccgggatgtgctggaggcggccgaaaacggcaatgagcgggcgcagctggcggccgacatgctggaatatcagctggtgaagctgattggcagctacgccgcggcgctgggcggggtggatgccattctgtttaccggcggcataggcgaaaacgccatgggcctgcgggagcaggtgatgcacgatctggcctatctgggcgtgaccgccgacctggcggccaacaacagccgcggcgaggaggttcgcatctccggggcggacagcaaggtggaggtatgggtagtgcccaccaacgaggagatcatgatcgcgcgggatactgcggagctgataaaataagcgcaggtcgatggcctgtaaaagcggcgccgccgtccgggaggacggcggcgccggagtttatgcaggggccgacggggaagggaaacaccggggccggcaaaagtcccccaaagcaggatggctttgggggatgggggtgtgggccgcgtaggggctagcaaaggggcagtgacggcgcccgcagggcaagccgtcctctgtggaggacggctatgggcggccgaaggccgccacggcggcggtgccgccggccctgcgggcgcggcccggttcctgctgcggttcagtggccgcgctcgggggcgggatcttcctcccggaagaggagagagatgcaccagatgccggctagcgccaccaaagtgtagatgatgcgggccacaatgctgccctgcccgccgcagatccaggcgacggtatcaaagcggaagaggccgatgccgccccaattgagggcgccgatgatgaccagcgccagagagatcttatccatgatcatggggaataaaactcctttctttggctccggatggagcatttggcagtagtttgcccggcgacgggcgggattatgcagcgggggctggtatttgcggcggcggggtgctatgatataggacgaaacacaaaaagggagggaccggcgtgatttttgatagccatacgcacagccgcttttcgacggatagcaaggcggagccgagggacatgatggaagcggcgctgaagaagggactggcgggtctgtgcgtgaccgatcattacgactgcgatgagatcccagccttttgcacgctggaaaacctgcggggtgccaaggcagcgctggaaccgctgcggcaggaatatgccggccggctggaggtgctgcggggcgtggagctggcgcagggcgtgctgtgccccaatgaggcccgggaaccgctggcgctgaccggctatgattacatcctggggagcgtgcacgccgggcgctggcgggaggactactactggatggactaccgggacccgccccacccgctgccggtgctgatacgggaatactttgagaactgcctggcggtggcccgctgggaccaggtggacgctctggcccatctgggatacctcaagcggtacgcgatccgggatggggtgacgctggactataccccctatgatgacctgatcgatgagattctgtgcacgctgatcgcgaccggcaaggcgctggaggtaaatacctctggcttccgctatgggttgccggagtggatccctgggattgagatctggcggcggtaccgggcgatgggcggtgagctggtgaccattggcagcgacgcccaccggccggaggacattggtgcggggcataaggaggcgcagcggatgctgcgggagctgggctttacccggttcttctatttccgcgcgaggaagccggtggcggtggagctgtaagcggaggcgtgtgaaaaaggcgggcaaaagatatttatttcagggcaagattgggggtcgcctaaaggcgtcgcgaagattttgcagggtgcaaagcctgtacggctcgccgccggggcgttccttttgctcctgcaaaaggaagcaaaacagggtcaatggggaccgggcttcccccttgacaatccctcttgacgcttagctgtgctggatacgaaaggcatttttctgcgaaaaagccttccgtactgcacgcagatgggcttaataaggtgtctgtgacacatttttatcgccgctgcgctggagcgcagaacggcgaaccaccacccctgtccc

SEQ ID NO: 4606 - DNA, 20593 bp, Unknown
  16S sequences of unknown bacteria
ttccaaaagtggttctactttaaacgtattttcatttctgcctgaagaagttcaaaaataattagaaatcaacgaaagagcaggggtatgagtcatctcgtacaccctgttttttgggaaaggggaatacccttgaaaagtaaagtttttcattatgccatcatgatgatagcaattatcacattaaattttttcttgcccagaatgctgccgggttcccctattgcaactctggcaggggaagaagcaggacaaatgacagaagatgaacgtgaccgattgatgtcttcctatcacttggataaatcattgggtgaacaatttctaatttacttaaaaaatttagtgactttccaatggggaaattcttatgttaaaaaacagccgattatcaacctcatgcttcaggcacttccttggactttattactggcaggctgtaatttaatactgtccacgttaataggaacgttgttaggagcagcttctgcttttctgaggaaaaaaaggaaagaccttccaatcgtattgatattaacattgttaagttctctccctgttttctggattggtatggtactgctttcgacatttggagtaaagttgaattggtttcccatttatggagcatatagtatgttccaaaataatagttgggttgctgccattggagacgtgttacatcatcttgctttgccattgtttaccttggtcattacttctttgatgacttttttcacaacttcgcgctacagtgtgctaaaaaccatcaaccaagattatgtcagcatggctcgcgtgagaggaattccaaaaaagagagtacaattttgctatgttatgcgtaatgcattaattcctgtttttacagtatttatgttagatttaggttacattctaagcgggtcggttgtggttgaaaccgttttctcatatcccggattgggttccttaatgtttcaggcagtatcgggaagagattacccattaatgcagtattcctttttggtggtatcgattatggtgattgttatgtcgttcttggcagatatgctatataaaaagattgatccggggctgggggtaagaaatgaaaaataaagcaattggtattgtaggactgattttaatctcttttattgcatgtttggcaatttttgctcctctgattgcacaatatgaccccaacgcggttgtaggcccgtcttatgcaaaaccaagcgcagaatttttgctgggtaccaatgatgtgggatatgatattttcagcgaactggtttacggagcacaatattctttgttggttggcttaacatctgctgcaattgcggcaggtatcggtattgtagtgggggttctttccggctggtttggcggaatgattgatagtatcttaatgaaaataacttcattttttattacaataccatatttacccttagtgattgtgttaacagcatttttgcccaaaggttttatttctatgtctttgattttaggattggtatcttggccggaaattgcccgtatcttacgttcacaaactatgaagatgcgtagcagagaatatattttatccattcaggcaatgggtgttagtcattggtatgtcatccgcactcatgttatcagagaattacttcctcttgtaacatatcagcttattttgcgtatcaaagcttctattttatccgaagcagctttaagttttttaggtttgggagagccaactgtcaaaagttggggttcgatgctttattatgcgcaagccaaagacgcgtttatgacggatgcatggttatggtgggtaattccgccggggatttgcattgcgattttaagttttggtttgatgttgattggatatacaattgaaggaaatatgaaccccgaaatggaggctgccatatgagtacaatattgtcagtacaaaatttatcgattcaatataaaaatcaaagttgctgcagtgtaaattcgttatcatttgatttgaaaaagggagaaacgctctgcctacatgggaattccgggtgcggaaaaagcacggttgtttggacaatcatgggaagaattcgttccatgggcggtatcgcttccggaaatattatgtatgaaggattggatttagtcacttgcactgaaaaacaatggagagaaattcgttggaaaaagcttgccttggtgccgcaatcttctatgaattcttttaatcctatatataccattggaaaaactttagatgaaatgtaccgtatacatatgccaaatttatctaaacaagagaaaaaagaacgaaagttacagttgatgtctatggtacatttggaagaacgtgttttaaattgttatccccatgaattaagcggaggtatgagacagcgtgctgccattgcggtagcaatcatgctatctccggaattgctgattttagatgaagctacaacagggttagatgtgattgtagaagctgatattttaaaaacactcatggaaattagagaaagagaacatacttctattttatttatcagtcatgaccatcggattgcaaaagctttttgtgacaggcaggtgaatttatgaaacaagtattatcagttcaagacgtgaaaaaggtatatcgtgtccgaaaaaccaaaggaaataaacaaacgaagttaaatgccttagacgggatatctttttgtttgaatgaaggagaagcacttggcattataggtgcaagcggttgcggaaaaagtacacttttaaagattatactgggactggtaaaacctacttcgggacatattacaaaaaaggaattggccggatttgttgcacaagacccatatgattcattgtgcccggcatatcgtgtggaacgaattatagcagaacctttgttatatactaaacgaaaacgcaggttaaaagattgtacagaagaaattaaaaagatgatggggtacgtacatttggattatgatacctatagacaacgatatccccatcaattaagcggtggagagagacaaagagtcagtattgccagagcgcttgttttatctccaagttttcttgctttggacgagccgacctctatgttggactatcatgtaaaaaatgatattgccaaaaccattcgttatgcagctcaaaagacaaataccgctattttattggtaacacatgacattactttggcagagtctatttgtgataccattgctgttatgtgtgatggaaaaatcatagaacaaggggaaacatttcagattttgcattcgccgaaaaatacctatacaaagcgattaatcgcagcaggaacagatattgaatcctattggtcattgcaagacgaagtttcttaaacaaaaacagcttgtacatctgtacaggctgttttttatggaacgatagtatgtgtttgtattttaacttactcataattctatttaagaaaattgtctttttataattgtgataagataaatcgacattgaatttatcaaattgtttcaatttactattaatactcaaatgaaaccatttttaaaagaacgcttataatgacgagaggtttttcatgcaatatatcatggcatttgatcagggaaccacaagctcccgttgtattctgtttaatcataaaggtaaaatttgcggtatggcgcaaaagaatattcggcaaagttatccaaaagcgggttgggtagaacacaatccaatggaaattttatcttcacaattagaagtagcaaaaaccgtgttacatgaaaccggaattacagcacagcaaatatcagcaattggcattaccaatcaaagagaaactaccattgtgtgggacaaaaacaccggagagcctgtctatcctgcgattgtatggcaatgcagaagaactgcggaacaagtgaaacagcttgaaaaagatggttgggcaaatgtgatacgcagtaaaacaggactgatacccgatgcatacttctccgccaccaaagtgcaatggattttacaaaatgttcccggcgcgcaggaacaggcagaaaaaggaaacttgctattcgggacggtggatacttggctcatttggaacttaacaggaagaaaacagtttgtaacggattattccaatgcatctcgaacgatgatgtttaatatccatcaattatgttgggacaaagaaattttagattatttcaacattccgcaaaccatgcttcccgatgtaaaaccgtcatcttatagatacggaatgaccacagatgatatttttggtatacaaatccctattgcttccgccgcaggtgaccaacaagctgctttatttggacaatgttgttttgaaagcggatgtgccaaaaacacatatgggacaggctgttttttactaatgcatacgggaaaaagagcgattgtttccaatcataaactattaactaccatagcggcaagtaccgatgagaacattgagtatgtgctggaaggcagtgtgtttactgcaggtgcatctgtacaatggctgcgggatgaaatgaaaatgctgaaaacggtagatgaatccgaatatgttgcgcaggaagtagaagatactgatggcgtttatatggttcctgcattttcaggacttggcgctccctattgggacgcttatgcaagaggaaccttactgggactgacacgcggaagcaaccgtgcccacattgtgagagcagtgctggaggcgattgcttttcagacatatgatgtcatacgcgccatggaagcagattttggaaaaagcattgtacaattaaaagtagatggtggtgcttctgcaaacaattttattatgcagtttcaagcggatttattgaatatatctgtactgcgtccgcaggaaattgaaacaacggcattgggggcagcttatcttgcaggactggcagttggttattggaaagataagcaagaactaatccaaaatacaacggttggcagaatttttcaaggtgctatgagcaaagaggaaagagaactgaaattgaatcagtggcatagagcagtggaaagagctcggtcatgggaagcagaatagcattttgttttgatacatatcagtatccctttcttataaaaaaacaccaacggcataaggggaatgccattggtgttttttatttttttggatgaaaagagtaatgagaagtaactgaggaggtattatgccgtacggcgatttttaaatgtaattggtgctaatatgggtatacatagccgtttacaggttctgcagatgtgatggattcaaccataatctgaggttcaggtctgccgttatattcgccttttgtaaatttacctgtaacggttatccatgcatcattttgaagctggtcagatttatcatatttacaaataatacctcccggaactacgtctgcaacgcagcatgacataaccaatcgggcaggaatgaattcgttatcgctcataaatttgctgtcatgatacacaaaaccggtcattgtaattgtatagccctcaaaacgttccggttttgaagaaagctctctaatccaggcgtaaaattcgtcatttgaaatatgaatcgttttgttgctttcatgataaccatgtatttccacttctttctgaaagaaattttttgttaaatatccatcaggagaggaagaggcagtctgtttttcattatcttttttattttgtgatgagttgaaagggtatgtagcggtaatagaagaggtagtattgtttttaccatttaggtcacttccattaatgtaccctgaggtaagactatgaagatcaattccgtttttgggaatcaatactattacaaggggaattaagataacgagacaatgggttagtttaggtttataagcaaattgaaataatctaaaaaaactaaaaataccaaataaaaataaaacgacaaccgcgaaatataaatacggtttcatacgtggtgttacgtatgaaagatatctgtcgcttatgattaatgccaataaagcagttgcaaacagaatatataaaacggtctcaatcaagcattggatatttagttttctcatacgatatacctctctaaaccaataaacgaacaaatacacatgacgagaaagcaaacaaaaaatactgttatggtcagtttagcaataaattttttggaaaagttacctgaaagcattgttaaatttttaatgtcaatcataggtccaaaaaccaaaaatcctaaaatggatatgaaaggaaattggtttgcaaaacttcgtgcaacaatggcatctgacgaggaacaaagagatagcagaaaggccattcccattaaaagtaatatcgagggaataatgtgcaaatttgcatctgtccatgctattttagaactgattacctgaaatacagtagaaataaaaattccgattaataaaaactttcctacgttaaaaaattcgttttgggcatgttgccagaataaagaaatttttcccttccatccaggcttttgtctcaaaaacagacatccgcattcacagttgtattcgtaactttttatggaaaaggatacttgcatcggtttaagcgtaaaaataagtccaatgcctatggcgcaaatcgttccaagtaaaattcttgccaaaacaattttccaattaccattaaaagcataataggtagataaaattactacgggattaatgacaggggttgcaaccataaacactactgcagatgaggtaggtacccctttttttatcagacttttaaacatgggaatggttgcacaatcacaaaccggcaaacaaaagccacataccaaagcaaataacattcccaataatgcatttttgggaaaccagcgttgtattactttttctgacaaaaacacttggataaaagacgataataaaacgccaatgaataaaaaggggatagcttgcaatagaatgcctaagaaaatactgataaccgtactggttgatatgttccataacggaaaaaaagtgctggctaaaacataaagaataccgactgctcctattccgcataagaaaggtaaaaataaaagttgtttttttgtatctattaatttaaaagaagagtttgatgttttatcagtaaatattattttagagcgaggggaataggattgaatgcgtttccgtaattctttttcttgtgttttggtagtacaatgatttacaattatgaattggctatgatacatttgctccattaaaatggtgcctgtatttttcagtaatgattctagcatatttgcattgataatatgtattatttttttcacactgcaaaaatcgcttaaacaaacggtatgttctaaaatatgtgtcaaaaataaagattctaaaacagaaaaatcagtcattccgttccattcaatccatatttcatccaagtgatgatcagctaaatattgataaataccatttatcacaaactttatatctgtatccaattgttttttcgtaaatgtcagtatagcgagatgctggttgttagtattgatacatagcgggacatttccgctttccaactgaatacagcatattttcttcgttttattttgagaaaaaatagaatttaaaaaggtagtttttccggaatttaaaaatccggttactatatttaccggaattgctttttgaagcacttcgcttttctttaacatagtatactttctatcgtatgctttattttttcgtcatctacattcgtgcctatcaaacaaatatagttaccttttaattctgttttctcaaaagatagttgatttggagtatattgtactttaagataatgatctccctcttgtatgatacccttagcccttaaaatacaaatatctttcagtttctccaatgacactataaattcttgcattttcttttgactcatatggtttttaaatcggattgtaaaggtctgaaaggagtccttggcagagtgatggtgttcgtggtggtggcagttgcaaggcgtatgcacatgttcttgatgactgcagtggcatttgacagaagatgatggcgcaagcactatatgataatcaatgtcctcaaaaggtttggaccaaatttcggcacagcaattataatttcttaattgttgttccacatattttgtgtgctccggatgttcagataccttgcttagaaaaatttgatctgcatgtttgatttggtcttcaaaaaattctccaaaattgttcacgtatatttgaaattgagagacgtccacaattgtgaatttttgaaccagctgcatttgctctatattttgtgcttttgcgcatgctttttctacatcagacagcttacttacaccggacggttctatgataattttatccggttgaaattgttttacaatatcaaccaaagattctacaaaattttcatatatagaacagcaaatacaacctgaatttaatgcttttacttcataaccgcactgacttaataaagaagcatcaaaatttatttctccaaaatcattttctataatgaccactttttcatttttcggtatttgcttcagtaaattttgtataaaagttgtttttccggcacctaaaaaacctgaaatgatataaatgtccgtcattttttatctcctttttgatggatccattttacttgtttcgttagaagtttgataaaaccaatcaatacaaaccaaaacacaccaactaaaatgatagtgcctcccggtttgataccaatgtaataggctaaaaataaacctatgatatggaacacaacaccaaacagcatagaatatagtactgttttacggaatccttttttcagctgcagagcgcaggctacagggagcaccataatagatgaaatcaccaatgtacccacaatacgtgtagcaacagaaaccgtaatggcagttaatatggtaaacataaaattgatgccgttaatacggattccgaccaatctggcagaagattcatcaaatgtaacatagaagagttctttataaaaaaggatgaaaagaatcagaacgattacacttaaagtaatgaccatatataattcggtatcactaatggcaacaatactgccaaaaagaaaactgttaaaattagcagcattactgacaaaacccgataatacagctgcagtaccgataccaacagagagcatgattgcaattgcaatttctgcatactggggtatcttttttcgtattgcttcaattcccaatgctgcgccgatacaagttaccgtggcaccgactacagggtttatatgaaataccaatccaccggcaacacctgcaagggatgtgtgggaaagggtatctcccaacatagacagtctttttaacacaataattgttccgatacaaggtattgtcatacccaatagaatacctacaataaaggctctttgcataaacgcatattcaaaaattgacataagatattcctttttctatcataaaatttcatgctgtgtgatattgcgattgttctgaaatagttccattttctaacaggtatatttgatttgctatgtttgatacatattctgtatcatgagaaatcaataaaatggtcaaacctgtttcttgatgtaaatgtgaaagcaattgataaaatgattgtacgctttcggcatcaatccctgtggtaggttcatctaaaattaagagactgggattcgataccaatgcacgggctaataaaaccttttgtctttgccctcctgataattctccgattaagcgactgctgaaatcttccatatgcaaaagagaaagtgttttttccacttttgtggtttcttttttgcccggaaagcgaaatagaccaagagaagagtataaatttgcctgcacaacttcttttacagtagcaggaaaatccatttgttttgctaacccaatttggggtacatatcctattttatgccaagtgcgaaacttagagacaggctgtccaaataaatgaatgctgccgttaaaacattttagttcgcctaacatcaaacgtaaaaacgtgctttttcctgaaccgtttgctccaaataatcctacaaatttatgtctctgaagttcaaagtgcaaatcttgaaacacgtgtattccattgtattgaaatgtaaggtgatgcacttctataatatttgaaacagaactcattttagtttaacgcctttttcagtgcggttaagttttctctcataaccgtaaaataatcatcgccattctccagttgagtgttagttaaaccttctatcgggtttaatacttcaagttgagctccggtagcatttgcgatggattgtgctactttagggctgacaagttcttcagaaaaaataacttttacttggtttgcttttacaaaatcaatgatttctgccatatgtgccgggtcaggttcagaatcaggctcaattccttgaatacccatttgatttaatccaaaagcatcacataaataaccgaatgcttcatgagataccaccaaattttttgtctttacctgattcaaagcttcctgatattcgttgtataatctgtcacactcatcgctccaagctttataattattttcataatactgtttgtgttcagggtcagtttttacaaatgcatctttgatattttccatttctttttttgcattgagtggatttaaccatacatgaggatcataatgctcttcatcgtggttttcttcgtttgtatggttctcatcttcgtcatgctcatgttctccgccctctctgagggaaatattttgcgaagcttccactgtggtgagtgatttgttgcttaaggtagatagtaccttatctgtccagctttccatacctgcaccgttgtaaacaaatacatcggcgtgttccaagctggtaatatcagttgtacttggttcccagtcgtgaggttctgttccggcagggaccaaattggttacatccacgtattcgccgccgatttttttggcaaagtcgtacatgggataaaaacttgtgataacatttaattttttgttatcattagacagtgatgcgttggatgatgctgacggttgtgatgcacatcccgctaacatcattgctgaaagcataactgccgcgccgcatagcagcaatatttttttgtaatatttcttcataattcctcctttttgtttgtaaacggcaaaacctagatatgaaattgagaatcaatttcatatctaggttattataaataaagacgattgtcaatcataattttaactaaattcatctttttacattttccaaacctattgatgctatatttttgtcttaattttgtatttacatcttttatacatttccatacagcccctgcagatgagaggaaatagatatgtagagtttttaaaacaacatatactagacaaaaaaggaaccggatatatatccggttcctttttatttcttttctaagtatgtttttatgacagatacaaatggttggaatgcggttggaattgcaatgtgttctaaatcttgtttttccatccactcaaattggtcgcaaaggtcaatggcctgtgcttcacaaaaaataagatagctgttcatatgccattcgatgtgcgtaaaaatatgcttggattgtttgctttccaatatctgttttgcaggtatatgccactggtctatttgtgtttgtaccgcgtggggagaaaggtggccttctacgttaggaaattgccataatcctgccaaaacttgcttagaatcccgtttttgcaaggcaacagcagactccgaaatcaaaagcaatacagttttattttctatacgtcttggtttcttttttgatttgatgggaagttccgtcgtgagaccatcttgaaaagctttacaatatgtctgtacgggacacacaaaacattgaggttctccgtttggaatacaaacggtagcgcccagttccatcaatgcttgattaaaatcccccgcatgttgtttgggcataatagcctgcaattgttttgtaatttcgtctttggtattttgttttgtaatatctccatagtttgcagtcatgcgggtgataactcttaatacatttccatctacagcaggaacgggaattccataagcaatggaagccacagcacctgctgtataggaaccgattccgggtaatttcagcaattcctcatacgaatggggcatctctccgtgatattgtgtcatcacttgtattgcagctttctgcatgtttcgtacacggttataatatccaagaccttcccaaagttttagcagtttttcttcttgacatgcagctaaatccgcaatggttggaagttctgcggtaaagcgattatagtatgcttttactgcttccacacgggtttgctgcaacataatctctgatacccaaatatgatatgcactgggtgactgccgccaaggaagggtacgcgcatatgtatggtaccagttcagcaagggagtaacgatattagaaagtgatgaattcatgataacaactccttttgtttcagattggaaaaggaaaggctgtctcagaacaggacagccttttgtttaatcttttatggaaggaattgcaacattcggattaacatctttactgtaatctatatttggtaaatcgaatccaaacaattgtctgaatgcaacccagtattcgtcaatgtaagagaagtcagtaatttcatgagcgtatagtttttcccagaatgcttcaatttcagattgcacatcttcccgaagttcccaatcatccattcttatttggcctgtttggtccaatacaggtgtatcaacaaataatttttcttgatacatacgtgcaatctgttcaattgcattttcgtgtatctgttttttctccataatgcggtataacaaagcaatgtaaagcggtaccacgggaattgctgcactggcttgagtgaccaaagctttgttaacagaaacatatgcgtttacattggaaaattcttttgtcatttcttgtgcggtttttaatagatgcgcttttgcagctccaagcgtacctttatggtacattggataagtaagtttaggaccgatgtaagagtaagcaaccgttacagtattctccgccaatactccggcttcgtttaaagcagtcatccagtctttccaatcttcaccgcccattaccttaatggtgtcgtgaatttcttgctccgttgcttttggaactgtaacttcaacaatttcttttgtttttaaatctacagtggtgttaacaaaatcttcacctgtgcatttcagaacagaagtataggtggttccgtctgacgttgtacgttttggtgcagcaagactgtatactacacaatcaatttgtccaagctcttgcttaatcaaatcaatggtctgttttttgatttcggcagaaaaggcatccccgttaatggtttttgcatagtagccgtcttttgcggcaaactcttcaaatgcagcggtattataccagcctgctgtggcagtacgggagccgctggcaggtttatcaaagataactcctacggtagctgcatcacagccataggtagaagcaatacgggaagcaagaccgtaacccgtgcttgcaccgattaccaaaacttttttgggtccgttacattttggtagattttttatatatgtaatttgttttcttacattttctttgcatccttcaggatgagaagttgtgcagataaaacctcgcaccttaggctcaatgatcataaaatgtcctcctgattatcgttcattttccatcaatttcacttaaaaataatattcttattataatactgttttaaaaaaatagcaaatttctgaaaaagaaagcataacaaattcgcagtagctgaaagaagtctttttcgtatttaaaatgttggctcctatggaagcgatttcacatttataggttagaaattgctgtgcggtttcttttatgctataacaaccttgtaacagcagcaaaactaaagttttggctgttaacaagaacgttttagcgttttatggttgaaaattgcaaagcaattttttaaatgctataacaacctagcaacagcagcaaaactaaagttttggctgttagcaagaacgttttaacgtttatgtgttagaaattgtttcacaatttcttttatgttataatatctgtcatgagtatatcatgaaagggtgcgtttgttttgaataaagcgattatgaaaacatttgcaataaaggcacgtaaaaaactgattgacgaaattcttgatagaattcaaatgttttcgctggattcaaaaacagagctccccaatttattaccaaaaaaccctgtgaaacaagaatgcttccttcaattacaaaggcaaattgaagaaaacgatgtattatctgttgcagaacaagctgcttgtgtttggtttcatcgtttggtttctatttggtttatggaagtaaacgagtaccttccgacagaaccgtttttctcgagattttctcccaacggttttaaaagaaatgatgtagatgcagatactttagaagaaaaagaagaaatgcaatattggaaaacatatggatatacagagcaggaagcggcggcacaaattttatttatgagagtatgcagtcaattggggcgtatctttccgcaactgttttcttgctatgctcagcctgttgattttttgattcccaaatttcatgttgacagcgtgatatacgaatttttatctctgcccaaagaggattttgtcctcagtcaagggggacaagcggagatgattggttggttatatcagtattttcatacagaaagaaaagaagagacttttgctttgctgcagaaaaatattaaaatcacaaaagaaagaatccctgcagcaacacagctgtttactcctgattggattgtacgctatatggtagaaaacagtgtaggaaaattatggctggaacaacacccaaatgcggaattggaagaaaagtggacgtactacttaaaatcaaacaatacatcctctcgagaaaaatacagcacagagttacgaccgcaagatattaccatattagacccatgtatgggaagtggtcatattttggtttatgcatttgatattttaatggatatttatggttcgcaaggatacacaaaaagagaggctgcgggtcagattattgcaaataatctatatggattggaaattgacgattccgtaagtgaactggcacattttgtcattatgatgaaagccagattttatgatgaaactattttggaacaatctcgttgtgttcatatatgcagtattcaggaaagcaatgaaatcacagacaatctacgtcaagaaatttggcaacagttttctatgttggaagaggaagaacgattggcaatcgattttgtaattgatgcgtttcgtgatgctaaaacatatggctcctgtttacagatgacacaaagatttcaaccgaaattttacgaaaaaacagctcgcagattacgtgaaattataacagacaacacatttgattttaatctggaacagtgggctatcatcaaccaatggttcccgctgttaattgctttgcttgagcaagcggatttattgacaaggacttatttggttaccattacaaaccccccttatatgggaaaaaagagtctgaacaaaaagattagcacttttttggaaacgaactatccaaatggaaaatcagaactgtatgcagcttttattttacgctgcaaagcttttacaaaagaattcggatatttcagcatggttaccatgcatacatggatgtttttaacctcttttcaaaagctaagacttgagatattaaagcataatcatattgaatctatggttcatgcaggagccgcgacgtttgaagaattgaattcttttaatgtgttggccgccgcatttgtcattcgcaaatcagaatcagaacaagatgattctcagtttatacgtttgacagactacttgaatacaggtgagaagataaaggaatattttcaaagtaaaaatcgatatgtgatgaaacaatcgtcattttattctgttccgggcactccgtttgtatactgggcttctgaaaatgcaattcaggcatttcaaaaggggactcctttgtctgtcatttctgcgccaagggttggaatgcagacagggaacaatgcattgtttgtacgttattggcatgaagttgatatcacaaaattttatgacaaagccaaaacatcatctgatgcgattgcatcgggagctaaatggtttccttataacaaaggaggcaatttcagaaaatggtatggcatgaatgaatatgtagtgaattgggaaaatggcggggaagcattgaggcgttatacaaaagccattttacgcaatgagcaggactactttaaagcaggcattacatggtctttgttcgggtttgaaaattttgccgtacgctacaaaacagaaggctttttatttgatgtttcaggttcttctatgtttcctcaagaagaacaaactgcagagcttttaggatttttatgcagtaaagttgcgttttactttttgtctctattagctcctaccgttaattttcaagccggaaatgtgggagacttgccaatactgccgcttaaggaacaaagggaaatattcattcgtttggtagaggaaaactgtcggatttccaaagaagattgggattgttttgaaaccagttggaattttaaaggacatccttttatgcaaattcatttagaatatcaggaaaataatttggaatcctgttatcgaatatggaaacaacaagctgacaatcgctataaaacactcaaacaaaatgaggaagaaatcaatcaagtgttgattcggctgtatcagttggaagacagtattactccagaagttgttgacagagatattgccatacgcaaagccgatttgacacgagatgtgaagttgtttttatcttatctgataggttgtttgtttggaagatatcatcccttgcattcggggatttggtatgcaggcggtcaatggaacagccaatcggagcatgaatatgcggtaaaacagaattgtttgatattaagggaagaggagccatcccatgcagagaatgatttggcttcacggatatttgtattgctggaacatctgtttggcagtgaacagttagagtataatctttcttttattgcgaatgctttggatttcaatagtgtaaatgcaagacaaaccattcgtacttatttatggcgtgatttttataaagaacatgttcgtttctatcaaaagcatccaatatactggcaattgaacagtggagttgacagtggttacaaagccctgatatatatgcaccgtgtgaatcaaaaggatctcaatggcattttacatcagttaaatttgtatgcccagcaattggaacaacaaatgacagcacaagagtttttcgataaaaagcaaaggaatagactgattgcaaaaaaagatgaattataccgttatcgtcgtgcgtaccaagcctctattgagcctttgtctcgtatatcaatggatgatggagtaaaagagaattatgcaaaatttcagaatatatccattgaagatgaaaatggtgaaacatatacggtgtctttgtttacccaaatataaaaagagcgtcctgtatatacgcaggacgctctttttacgatgatgttattccggaatttttaatacttgaccgggataaatgatgctgctgtgtaaattgttcagtgaaacaatttctttataacgcgcaccattatccaaaagagtttgcgcaatatcccaaagagtgtctccagttttgacagtataggtttttgtagtatctgaaccggcattactcgcgccgccgacaggcaatttcaaaacttggcccggttgaatgatatcgctggttaaaccattcaatgtcataatttctttgtagcggctgccgttacccagttgactttgagcaatatcccacaatgtgtctcctgctttgacagtatacgtgcttgcggaaccggtgttatcgttgccggtaggcaattttaaaacttgacccggctgaatgacatcgctggttaaaccgtttaatgtcataatttctttgtagcggctgccgttacccagttggctttgagcaatatcccacaatgtgtctcctgcttttactgtataggtgttattgtcagtgacaggaggctgtggaggagtaatttcacctgcatcactacccagatagtttaaatctacgtttgcgggaatacctgcaactctgccgctgctggtatattgccataagaagtagttgcctttatagtctaaagtggtattatattgtgcaatccaaactcgaatgcctgcgttatcaatttgagacatatcaatataattggttgcccagtttaagttagtgtatagcataggctgatagcctgctgcttttaccatatcgcaaaaggcaagaatcatggcggttaatgcctgtttacccatagctgcttgacttgcttcttccacatccattgccaaagggtaggaaggggaagtgcctttggcgttattgataaaaaattccgcttctttttttgcatcttcaatgtttgttgcataactgtaatgatacattccatatggaatgccattgttttcacatcctgttacattgacacgatattgattgtctacagtaccgaatccgtagccggctcgtatcattgcgcctacaatgccgtcttgttttacctgtgaccaatcaattgtttgttggaaggtacttacgtcgacaacttggtttgccatattcataattcctcatttcgtattttgtgtggtttagcttgtaccaaaaagaatcataatgaatcatgctgaaatacagtgttttcattattacaagcttaaaccatactatgtaattacagtaaaaatgtttatattctttatcagctcaacctctcagtaaatatattgaacttgtatgaaaagattcattgacaaacatgcggttcctttgtatgatagatataatattctttatatcaaattttgtttgttttttattgtatatcaaagtaatattcgaaaaaaagagaatatcatttgaatatgattccataatataattatatacaaacacacacatatgaaatacttatgcgtacgtgcgtaggtatttcatatgtttatttatgaagatgcgaaatagaaagagagcttaatatatgccatcaagttttacagaataccctttaagtgaagaaattttatctgcgttggagcagttgcaatatcgtacgccaacgcctgtgcaagtaaaagtgattcctgagattttagcaggaaaagatgtattggcaaagtcccaaacaggaagcggcaaaactgcttcttttggaatacctctttgtgaattggtagaatgggatgaaaacagacctcaagctttggtactggcaccaacgcgagaattagccatacaagtaaaagaagatatttttcatattggacgttataagagaattaatgttcccgtattatttggacgttctccattttacaaacaagtacaggctttaaaacaaaaaacgcatattgtagttggaactccgggccgtgtgctggaccatatggaacgtaaaacattggatacatctgctatccgttatcttgttattgatgaagcggacgaaatgttaaatatgggatttttggagcaggtgaaagcaattatttctcatttgcccgaacaccctgttaccttattgttttctgctaccatgccaaaagaaattgagcgtttggctcaagcctacttgcatcatcctgtacgtgttgaaatcaaggctgaaaccgtaacggtagatagaattaaacagaccggtttccgagtagaagaaacagaaaaaatgcaattgctgaaagatgttttagtattgcaaaatccggatagttgtattgttttttgtaatacacaagagaaagtggatgctgtatatcaagagttaagaaacagcaatattccgtgcggaaagattcatggcggtatggaacaggatgatagaattgttgttatgaaccaattccgcagaggaaattttcgttatttaattgcaacagatgtagcagccaggggaattgacatagaccatgttacccatgttatcaattatgatttgcccagagcaaaagaacattatgttcatcgcattggccgtacaggaagaaacggaagaaaaggaattgcagtaactttttatacaaaagaagaagcgcctgctgcacaggatttacaattatatacatgttcccattggatttttgttataccgccaacaaaagaattggtagagcaatatcgtcctgcatttgaagaaacattaatgcagaaaccggactttaaacctgaaaaaggtgctgctttcagtaattcaattaccaaaattcacattaatgccggcagaaagaccaaaatgcgtcctgtagatgtagtaggtactatttgtagcattaaaggagttacttctgatgatattggta

SEQ ID NO: 4607 - DNA, 1523 bp, Unknown
  16S sequences of unknown bacteria
ccgcgcatcctccccccgcctccccctcccaaaaagcccataaaaaaaagagagggggccacagccccctcccgcgcccggaaacgtccaccccatgcggacgtttccgatgcttatcgctccgtcatctttttcagcgcgcgccgcacctgcgggaatgccatcaccaccgcgcagatggccagatccacgaacacgaacgagttgtacgaaaccgagtacaccagcggcgacatacccgtgccctcggcgtattccgcgaagaacaccacgccgctgagcacatggcacacgaagcggcccacgccgcccagcgcgatgccggccagccaaccccagccgtcgggcagtttcctcgccaccgccgccagcgcgatgcacgcgaaggccagcgggtaatccagaatggcctgtaccggggatacgatccacgggtcctgaatcatctgaagcaggccgtaggccacgcccaccaccagtcccggcgcgaggccgtagccgtaggcaaacgcgatgatcggcagcagcgaggccgccgtgaccgcgccgccctgcggcaggtcaaagagcttgatgtagctcagcacgaaggccagcgccaggcacagcgcggcattggcgatcatgcgggccgtccagcggacgcgtccgcgcgcgatcaccagcagcaccacggccagcgcggccagcgcgcccacggcgatccagcctgtggcgcttacgtcggcaaagtcgaaactcatggaaaaccaacctcccatcctttgtgccgcgcgccgcccaggccgtgcaaaaacgccgtcccaaaagggacggcgtagctgctttcgtatctctgcgcttccctacggtaggattgcctacatcaggttcaaagggaccggcccaaaggccatctcagcatttctgcgcccccagcggttatgcggttacgggtatcataccgcccgccgccgcgtttgtcaataggcgtttttggtggtacaatacccccatcccccctctcggaggcgattcgcatgcccacctgttatatcgtcggcgcgggtgattttaccccgcgcggcttcgcgcccgtccccggcgacctcgtcctcgcggccgacggcggctatcgcgccctgtatagcctaggctatatgcctgatctccttctgggcgatttcgattccctgggtgatctccccctcccgccggacctgcccgttctgcgctttcccgcccgcaaggatgataccgatacgggcctggccctgcgccacgggctggaccggggctatcgtgacttcgctctctacggctgcgcgggcggacgggtggaccacctgctggccaacctccagagcatggcgcgcgtgagccgcctgggcgcggcgatccgcctggccgcgccggagtacgatgcctgggcgctgaccggccccgcgcccgacacctccgcgtccagcacccccgcgcccgacgccctcgcgccccacgcctccgcgtcccacgcctccggccccgctccccacgcgccccac

SEQ ID NO: 4608 - DNA, 9876 bp, Unknown
  16S sequences of unknown bacteria
cccggtcaagcggctggagttggccaaccggctgctggcgaaggagctggaggtcttgggcatcgagagcgagctcaatgagcgcgcccaggagagcatcaacaagggccagaaggattactacctccgggagcagctcaaggtcatccgctccgagctgggtgaggaggacgaggacaacgagctggacgaataccggcagaagatcaaggccctggagctttccgaggacacggagaaaaagctgctgaaggaggtctcccggctggccaagcagccccagggttcttccgaggcggcggtcatccggaactatctggatatctgcctggacttgccgtggaacacccggacgaaggaacaggtcaatgtcgaagcagcccggaagcggctggatgcggatcattatggcctggaaaaggtcaaggagcggattttagaatccttggcagtgcggcagctgtcgccggatgcgccgacggagatcctttgcctggtgggcccccccggcgtcggcaagacatccatcgccttcagcatcgcccggtgcctgaaccggaagctggcgcgcatcgccttgggcggtgtccacgatgaggccgaaattcgcggccaccgcaagacctatatcggcgccatgccgggccggatcatcaccggcatccagcaagcggggagcaagaacgccgtgctgctgctcgacgagatcgacaagctgggcagcgattaccgtggcgacccgtcctcggccctgctggaggtcctggacagcgaacagaatgcgacataccgggatcactatcttgagctcccgtttgacctgagtgagtgcctgtttatcacgacggccaacacgacggagacgatcccccgcgctttgcttgaccggatggaggtcatcgagctggggtcttataccgacgaggaaaagctgatgatcgccaagcggcatctgctgcgcaagcagctggcgctgcacgggatggacggcaagcaggtccgcgtgacggacgacgcgctgcgggagatcatccgctgctacacccgggaggccggcgtgcggaacctggagcggcagttaggcaagctagcgcggcgggctgcggccaagcttgtgcagcaggatgcgccgaagcgaatcacggttaacggtgcgaatctggaggaattcctgggcgtacgccgcttcctgccggacaagctgcccccctgcgacccggtcggcctggtcacaggcttggcctggggcgagacgctggaggtcgaggtcaatgtcatggacggcagcggcaagctggagctgaccggcaatctgggcgacgtgatgaaggaatcggcccacgcggcctggagctatctccgcgcccatgcggcccagtggcacattgccccggatttttataagacgaaggacatccatgtccacttcccggagggcgcggtacctaaggacgggccatctgcgggcatcaccgtctgcacggcgatggtctcggctctgtccggcgcgccggtgcggcgggatatcgccatgacgggggagatctccatccgcggccgggtgctgcccatcggcggcctgcgggaaaagacgatggcggcgctgcggcacggcatccgcctggtcatcatccccaaggccaatgaaaaggacctggaggagatcgacccgctggttcgcaagggcctgaactttatgactgccgagcaggtggacagcgtgctggaagcggcgctggatttctccgcctgcaccgcaccggttttggaggatcctgcaaagagtgcaccgcagcaggttgccctgccggtgccggagcaggtgaataaaaccaggacgccggatctgcggcaataaggagcgggtatgaattttcaaaacgtttcgttcgtcctctccgcggcctctccggcggatttccgccgggatgggctgccgcagatcgtctttgcggggaagtccaatgtgggtaagtcctcggtcatcaaccgagtcctgcagcggaagaattacgccagagtcggcgaatcgccgggcaagaccgtccacatcaactattttctcgtcgatggggcagcgtatctcgtcgacctgccgggctatggctatgccaaggtccccaaggcagagaaggaccgctgggcccggcttatggaggattattttgccgcggagggcctcatcaccctgggcattatgatcgtcgacacccgccatgccccgacggcgctggacaaggtcatggccgattggttcatgcagtccggcgcgccgttcctggtggtggccaataagctggataagctgaaaaagagcgagatcgcgccgaatatgcagcgtatcgcggacgagcttggcctgccggatgtatgccacgtgctgccgttttctgcacaaaagggtgacgggcggacagcgctggtcgagctgatcgagcaggcggcgcaggggcagctgtaataggatgaactgattttagaacgcgccgcttcgtgggcaatccgccccggggcggcgcgccttaaactttcttaaattcgccggaaaacagatacattttgctgcgggtgtgttatgataacaaaaagaagcggctgcgcgagaaaacgcggcgaagggggccggagcagtggaagaaaaaatacaggtgctggtggtggatgacgaggccgatatccgcggcttgctgcggctcttgctggagcgccatggtatggcggttatagaggcggccaacgggcggcaggcaatcacggcgatacaggtacatagcggcttggaccttgtcattctggacgttatgatgcccaagtgcgacggggtgcaggcttgcagcgagatccgcaagctctcatctgtgccgatcctgtttttgaccgcccggacccaggaggcggatatgcgcgacgcctacgccagcggcggggatgattacctgggcaagcccttctcccaggcggagctgctgatgaaggtcgattccctcatccgccgctaccgggtctacaagggcaagcttcagacccagatgctgccggggatgatcgagctgtgtgatgagaaccacagcgtcaagaaaagcggcgcgtatatcgatctgacggatatggagtaccatatcctgaaattcctagtgcagaaccgggggcggacggtctctgtgcagcagatctatgaaaatgtctggcatgaaaaatacatgccgacctcttccaataccgtgatggtgcacgttttaaatttgcggaaaaagctggaggcatcgccttcgtcgccgaagctaatccggacgatttggggaaagggctatcagattgactaagaagcattattgcccgctgcggctgcagatggtgttctgttttattttgggtgcggcctgcgcggtggcaatctattttggggtgtcccgcctgggaacgtatctgattgaccgctactatctggatgagaccgccacgctgcggcgagaacaggcgctgctggaaagctttgacgattatgtgcaggcagggaacctgacctccgaggattccgacgccatcggcgcctgggcggaggatatgaaatacgcctatatcttgatcttccgcagcggtgtgctgacgatggaagcagatgcgacgggcgtctcgcagcccctggaggacgaggacctctggtatgacgatcaaatggcctatgaccggtatttttacccggtgcattttcaggacggcgtctgcgccgtgacggtctatgatttctcctctgcgaggatgtatacgatttcaaatgtcgcgtccataacgctagcagcgattggctttttagcggtaatcctgctcaataaccgccgtctgcgcaagcgtattacggacatttcccactgcgtctacaaggttgcagcgggggatctggagctgaagattacggaatccggtcgggatgaactttcggatttggctatggatatcgaccagatgcgccgtacactcctggaccagctcaaaaaagagcaggaggcctggcaggccaatacggatttgctgcgcgccatctcccacgatattcggacgccgatgaccgcgctgctgggctatctggacttggtgcagtcccaccagtacgagaccaaggcgcagttggagcagtacctcgcaatctgcgacgcgaaggcgcagcagctgcggcagctgacagacaagctttttgggtattttctcgtgttcgccaaccgggagttgcacctgaaacaggagccgctggatacccagctgctgtttacccagctgtttggcgaggagatctgctgcctggagaacgagggctttaccgtcacctgggagcgtctggagcaggggcagaccgtcgtgaccgacgcggtgcagctgcagcgggtcgttgcgaacctgttttccaatatccgcaaatatgccgacccggcaaagccggtgcaggtgcaggagcagctgcgcaaggggcgcatttgcgtgcggctttccaacgctgtgaatccggtggccggtgcagtggagagcaatcagatcggcctgcggacgtcccgcaagctgatgcagctgctgggcggcggcctgcacacgtcagaggccaagggcgtcttcctggcagagctgacactgccggtgcagccccagccggagcctgcggcggaagcttgagtttttttcgctgtaaacttgacaaaaattggccggtatgataatataagcctcgcagccaagcaattcggagagatgtccgagcggtttaaggagctggtcttgaaaaccagtgactcagcaatgagccgtgggttcgaatcccactctctccgccaatcctctcaggatttctgcgatttggagaagtacccaagtggccgaaggggctcccctgctaagggagtaggcgtctaaaaagcgcgcaagggttcaaatcccttcttctccgccaagcccaccgtgattttttgaaaatcccggtgggcttttttgtatttttcgtagcctagaatagctgcgtggtttttgtgcggcatgtgccggttttctgcgaaaaagccgggatgttacgctgcgttgcttgcggcaacgggggtgtttggggtatcatcgcggcatcggcagaagaaaggtggtcaaaattttatgctgagcgaaaatttaaaaacatgcagaaaagcaaagggactttcccaggaggagcttgccatcaagctgcatgtcgtgcggcagacggtctctaaatgggaaaaggggctttccgtcccagatgccgacctgctgcttgccctctcggaggcactggagacgccggtcagcaccctgctgggtgagacgatcgccgcaccgcaggcggatgacctgaaagcgatcgcggaaaagctggaggtcatcaatctccagttggcaaagaggaagcggacgggaaaatccgtgctgcactgggtctgcattgcgctgtgcatcgtgctcgtagcgggatttctggcgctgcttgccatgggcagcccctatctttcctggaattaccaggacccggagacggccgtggccggggtggcgctgcatgctgccgagtggctgtatgtcagggcagcgccggttctcctgctcgccgcagcagttggggcgatcctgactcgaaagcgggattaaacggcgcagaaaagcgctgcagcgcgttccgtgttaccgcggggcgcgctgcgtttcagtgcggcaggggcgtattttctggatcttttgcgaaaaaatcctgctggaatattgcaaaactggcggtttttgctattgtatttgcagaaaaagaaaaatataataggggtacgctccacctggggcggcagaacgctttgggcgcgcagcagcgcggccaaattttagtacccctgcggcgcggcgcagagaaagtcaggcggtttatgggaaaatatcgggcacttgcccgcaatacggtcatcatcagcgccgggacgatgctttcaaagctggtcgtctttttcatggtgcgcttttataccggcgttctttctccggcggaatacggcacggcagacctgctgattacgacggtcagcctgctgacgccctttatctccttggggatctctgacggcgtcttccgctttacgccggagtacccccggtcgcagaaaagcattttcagcactgggatctacacagtcacagctggtgcggtagggtttggcctcctgctgccgctgctgcatctggtgccggagtttcacgggtatctggccctgctggttctcatgacgctggcgtcctgctatcatgcggtctgtgagcagtatgtccgggcgcagggggatacgatgctgtatgccctgcaggggctgctcaatacgacgctggtcgtcgggctgaatattgtgctgctcaaggtgtttcggatggggatcaccgggtatgtgctgtccgtcgccttggcggatctgacctgcacggtgttcctgattctgaaaaagcgcctctggcgccggatgacgcgccgcccaaaccgcaatctgcggcggaaaatgctgcgctacagcatcccactgattccgacgacggtattctggtggatcaccagtgcgtcggaccggtatatgatcaacgcaatgctcgggggcgatgccaatggcatctacaccgtcgccaataagctgccgacgattctgacgctgctctccagcgttctgatgcaggcgtggcagttttccgccatccaagaatcgaagagcgatctgcgggagcaggcgcatttttattccaatgtctggctggcgctgatggcggcgctgtttattgcttcgagtgcgatgattgcctttgcaaagctggagatccggctcctggccagtgatgcgtattttgatgcatggcaatatgtgccggtgctctgtgcggcgatgctgttttgcgcctttacctcgttcttaggcagcgtctataccgtgacacagcgcagcgggctgtcgttttggacctcgctcatcggtgcggcagtcaatatagctcttaacgcgctgctgatcccgtccaagctgggcatccagggcgcggccattgcgacgtttgccagctattttattgttttcctggtgcgggccagaagcgcccggcgtctgatcccgttccgcctgtttcaaggaaccttgctgctcagtaccgtcgtcctggctgggcagatcctctttatcagcttccagtggcctggttggcagatcgcccaagccgtcgccctcctcgcccttctcatcatcgaccgccgccagctccttgaactcctgtacgacctggcccggaaacgaaaaaaacaataatgccaaaagcagcttgccaaccaaggcaggctgctttttggcattgccgcgaaagctgctgcgaaacatggttttctgcccctctgggggataatgcgagatatccaataggattcacaaaatattaacaattttttgataaaaatccattgcagcagattgtaaaatctggtatagtatgcttgaaaatatttttcaatagaaacaatcaaacgaaggagcggggtatgatgtatgaggcgtgtgcggcacagttgctggagcttttgatttatggagcgcacgcagggcagcgggcgcggcaggcaatgcagatgctgcaaggcgagatcgtggtactttacttgctgtattgcttaggcggcagcgcgacgccgggttatatcagccgccaactcaaccgttccgcctcccggattaccaataccctcaacgccctggaggaaaaacattttgtccgccgggaccatgagagtgacgaccgccgcaaggtcacggtacacctgacgcagaccgggcgggcctatatggagcaagagcagcggcagctgatcctggcgctggcccgggcgttgacttgcctaaacgagggcgaggtgcgagaatatcttcgcttgaaccagaaactcagccgcagctttcatggcgcattcccttgcccgttgggcagtccagacgccaagccgctggcctcgacgaaaggaagtgcgtaaatggaaaaaaaggattactcctgcattacaccggaaatttttcagatggcggagctttgcaagcacgaaggcgtgattgacaaaacactttatgagacctataaggtcaatcgcggtctgcgagacgagaacggcaacggtgttctgacggggctgacggagatttccgaggtttgttcccgggagccggacgggacgccctgcaatgggcagctgttctaccgtgggtatgacgtcaagcagctcatccagggctgcattcaggaaaatcgcttcgggtttgaagaggcgacgtatctgctgctctttggccgtctgccaaatgaagcgcagctgcatcgcttccaggagatgctggctgggtaccggacactgccgaactcgtttgtccgagatattatcatgaaagcgcccagccgggatatcatgaattctatggctcgctctgttctgacgctttacagctacgacaacaacgccgacgataccagcattgccaacgtgctgcggcagtgcttgcagctgattgcgctcttcccgcagctggcgctgtatagctatcaggcgtatgattactatatcaaggagaataccagcttctttatcaatcatccggagccgtcgctttcggcggcggagaatatcctgcatatgctgcgcaaggacggcgcgtatacgaatttggaggcgcggctgcttgacctggcgctgatcattcacgccgagcacggcggcggcaacaactccacatttatcacccacgtcgtcacctcctctgggacggatacctattctgccatagcagcggcgctgggctccctgaaggggccgaagcacggtggcgcgaacattcgggtctgccacatgtttgaggatatcaagcggcatgtgacagattggaatgatgaagcggagattgccgcctatctgacgaagatactgcacaaggacgcctttgatcacagtggcctgatctacggcatcggccacgcggtctactccaagtcggacccgcgtgcggagatcttccagtcctttgtttctatgctggcgaaggagaaggggtatgagcgggaataccagctctatgccaacgtggagcggctggctccccaggtcattgcgcaggagcggagaatgtacaagggtgtcagcgccaatgtggacttctacagcggctttgtctatcagatgctgggcatcccagaggagctgtttactccgatttttgccatctcccggattacaggctggagcgcgcatcgggtggaggagctcatcaatggcaaccggatcattcgcccggcgtaccgcgcggtcctgccccggcggtcgtatcagaagctggccgagcgttgaaggcggaccaaaataaacggatcaaaacaaaagatctggtgcactgcaacggtgcgccagatcttttgttttgcgggcgtgtggcctcggattagaaggaccaggggagataggaaaacgcgatggcaaagaggatggccgggagcatattggctacccgcagcagcttgccccagacgagattgacccccacgcagaagatcaaaatcgagccgatcagcgagagatacgagaccgccagctccgtcagtgccgaggccagcagctggggtcaggagcgtgacggctccctccagcacgaataccgggatggcggagaagatgcagcccttgcctagtgatactgattcttgattaaaatatttaatcaagaatcccgtgtgctacgcacactcgcatcgtgcgaatgcacgctgcgccgtctcatgcagaatctgacgcgccgttggcgctataaaaagctcttcaagctttttaacagattctagtat

SEQ ID NO: 4609 - DNA, 32759 bp, Unknown
  16S sequences of unknown bacteria
cttggcggaacgggcgtcggcggcggtactctcgtgggactgtcgaaaaagctcctttccatggacaacgtggagcacatctcaaacctcgcgaagacaggctcgacggaaaaggtcgacctcaagataaaggacatcacaaaagcggatatcgttcccggattcggcgacattatgaccgcgtcaaacttcggactgatggacgacagagcgacaaaagcggacatcgcgctcggtataatcaacatggtgtttgaaactatcggcatggtttcgattttcgccgcacgcaactacaaaacacgcgacgttgtcctcacgggaaacctctccggcgtaagtcaggctccggcgatatttgagacgctgaaccgtatgttcgacatgaattttattattcccgaaaactcacggttcggtacagtcatcggcgcggctttagcagggacagagtgagaatatgaaacagtcgtttttgctcagagcatttatgctcagcagacggcttttcatatttacaacaaatttataatatctgtattgacttgaaatgtatgctgtgctaaaattaatcattaacatagcattattgtttggagaataaccccgaatgaacaaaaataaaaaactcttgctctccgtactgcttttagtcggaatagtggtcggagttacgctgtctgccggtctgcactactggaatacggaagaagcggtagaggacgagacggcggagagcggcaatataacggaagaagctcaggaagacgcagacgaaactccacacggaagcacaagactcggagtgaaccgcggcggagtaacggtaagcggaaagagcgacacgagagagctgacggaagaggaaaaagaaaaatatcctcagcttacgaacattccgacgctgtacattcagctcgagaacaacaagagtatacaccgcataaaacacgacgaatggatgaacgcgacctacactcttgttgacggagacgagggaatagtagagcagccgtttgagataaagggaagaggaaactactcgtggtcgatgagcaaaaagccgtatgccatgaagctcggtgaagccgcttctcttctcggaatgggcaaaggcaaaaactgggtgctcatcgctaactggagcgacaaaaccctcatgcgaaactaccttacaatgcagctcgcgagaaacatcggtcttgaatattcctccgactgcaaatatgttgacgtatatttcaacggtaaatacaacggaaactatgtcctcacggagaagattaccatcggaaagcacagagtgaacatcgaccccgagacctgcggactgtttgagatagaaatggcataccgccacggtgactgcacatggtgtatcagcctgccgagcggcgtccacgttaccttcaaagagccagacgccgacgactacggtacggaattcaaggaacaacaactgactaaattccgctcgctgttcacaaaagccgatatttcgatagctcaaaaaggctacgaatattactcgcggtatatcgacgtggactcgttcatcgactggtatatcgtcaacgaattcgtgaaaaacttcgactccggcttcactacgagctgctactgctacgccggtgaggacggaaagatacacatgggacccgtatgggactacgacacctgcatgggaaaccaagccgtcgcaacctgcgtagagtacgatggataccatgtcggaacgtctccgtggtatgacgcgcttctgcatgacgagaccttcttccgtatgctgtgcgagagatggacgttccttatcgacagcggcgcaattcaggaaaacttctttgatctgatgaccgataccgacgagtacatctccgagtcatgcgccgaaaacttcaagatttggaaggacgcgctcgcgtttgacggactgagaggaagccacctgtcgacatacacgcatgaggacgaggtcgaatacgtgagaacatggatgacgaaccgcatgaactggctctcatcgcagtggtatatcggagacaataaataaaaaacatccggtgataatggggaaggagcaggaccccgctgtcaccggatatttttgtgggtaaaattacccgaggttactctgaataaatcggagttaacctaatatctcacgtgccaaggcttcagcgaaaatatcggcgctgagtaatgcctcgtcaagtgtagacgcacatgaacctatctcaacaagcatagaaccctttgtgtactgctcgttgaacgaagcggaacgaagatttatgttcctcattatagtgggatagtctgccgagatgccgcattggagccgcagagctaaggtgagattgtctctccagcctgtgtgacccgagccgccgtagtccgttcccacgacgaacattatctgagccgccttgaccttgttctcgatagtggcggtgggagcgtagtattcgccgtcctcgcccattatggagtcgcggtgaatgtcgattatgtatgagattgacggatattcttcaatgtatttctttatcgcgagggaggcgttgtaatacgacatattgaagtccggattgtcgtacagcacgggggagtgaatggtcttgattccgctgtcgttcagcttctgcgtaactctctctccgagcgcaacgacatttttttcgctgtccgttgtcctgtagccgctgtcggaggtgtctgagaagccttcgctgccgtgagtgtgaagaatcaacacaagaggttcaccctcaccgtatactgtgtaaagctcctctgccctcggtatgattcgtccggcggcgaggagagcgtctgtgtcgggctcgtacggagtttcgttcgacagctcaatcggtatcggcattatcacatattcttcacgggcgtccgtctcatcgtctgtctttgcggcagtaggatagggagatacggtttcggcttccgcttcggtttcgactgcgctctctttcacctcggatgaagctacagccacagcgtcacgtcccgttatcgtctttatcgcgagctttgttatgctttccgcggagatgccgagctttccgaatatatagatcccgcagaacagcgcggtcgtcagtgtgacaagacacatggctgacacgaaaatcttctttaaaatgcttcccgtttgagccggagagggagcttcttcagtgctttcggtttcagtcggagaatcggcttcgattttttcttcttccttcagctccgcggtgagcagcatatcttttttttcgtccatctgtaagtcctccgtttcatgctaaattatattcccgtgcagaggactatatgacaagcaaaagctttattttcgggaaaagataacgccgtttatcgcggaagcaagcacggtcgagtagcattccgtgataacgtcaacgtccgccggagcaagcagcctttcttcataataaaatacggtgggaactccgagagatactacagggcagggcatggtcttcgcgctgatctcccccgatgtgtgtgcgagagcggagccggggattagtccaacattgtttatctgcactgccgttccgagacgggtgatatcggtggcgcatagtgaatccacggttatgataagctccgcgcctatgctttttgctagaagagatacggtctccgcggtgtcaagtccggtctgagatggcgttccgggagaagcggcgtagagaagagcagtgcctgtgacgagctttttgcacacgagaggaccgagacagtcggcggcgatatatcggtttcctattcctgcggcgagtgcggtttccgcttttctgacatacccggacagcacctctctcaccgctcccgacagcgccagcttttcctccgtccccctcttccatacctcgcccgagagaacagtgtggcaagaaaagtttccgctcctgcccgagagcacctcatatcccccgacggaatacctctccgagacgggaatgtgcggcgtgcgggaaggctcgagagcgtcgttgtcggcaaaaagatcacttgaaaacggcatggacttcacctcgctgtgacgtttgaggttattttgcccataaaaaacataataatgagcttcgggacaaaaaagtcacagtaaaactgcacaaaaaataaggctctaattgtgcattcggatgaatcttgacaagaacctcaataattgtgttgattcttttaaaaaaaagtgatataatgaggtaagtttaaacgacacgtataactacgctttacaagaagcacgaggaggattaactgaatcatgaaaaaggtgttatcccttgtccttgctatgctgatggtggtatcggttgtagccggatgtacgacacttgaaaaagacccttccgaccctgagggcaaaaaatacgataagggcgcaatcattgatatgtatctcacgacagagatatataatttcgacccgcagctgagcatcaccgatgacgcgcagctcaagattttcagactcatttatgaaggtctcactaccattgacgaaaacggcaaatggcagagcaccggcatgaagagctacaagatcgaaaaggatacaagcgaacaattctctattctcgttacacttaacagcaacaagtggagcgacggtcgtactgttcaggcttccgactacgtttacgcttggaagagactccttgatcccgattcaacaagcgaagcatcctctcttctctttgatataaagaacgcaagagacgttaagatgggcgacgctacaattgacgacctcggaatcgccgctgttgatacctacgttctccagatcgagttcgagacaaaggtagaccttgaccagttctttgaaaactgctcttctatcgctctcgttcctctccgtgaagacgttatcacacgttacggcgacgatgtatgggctcagaaggctaccactattgtaacaaacggaccgttctgcccgaaggatatcacctacggcaacactctccgtcttgagcgttcttcctactactacatcaaccaggataaggacgaaaagctcgacaaatatgtaatcccgtacagacttcttacaaagtacagcgaaggcaacgcagaggctcagctctcctcccttctcaacggtaagatctactatgacggcgaaattccgctttctcagagagcgcagtacgcttcaagcgctgttgttacagacatgatgacaactcatacctacgtgttcaacacaaagaatgagctgttcgcaaagcccgaagtaagacgcgctctttccatggctatcgacagaaatcagatagtttctctcatcacattcgcaaagcccgctacaggctatatcccttacaaggtattcaacacaacctccggcacttccttcagagatgttggcggcaatgttatctccgcttccgctgatgcttccggtgcaaagagccttctctcttccgcaggcgttaacggcggttccttcacactcaaggttcgcgacaatgaagttgacgttgctatcgctaactatgttgcaggcgtatggggcgacctcggatttaacgtaaccgttgaagctgttaaggctactcctaacgcaaacgactccacaatatttgttgacacattccagaaggcatacgacgacggtgactttgacgttatcggtatcgacatgaatatgctttccgcagacgctttcggtgcgctttcacagttcgctacaaagttctccggcaacggcgttgatatggactccgaaacctacgatctctacggacacatcaccggctacgcaagcgaagattatgatgctctcatcgaatccgcttacgccgaaaaggacagaaccgcaagagcaacaattctccaccaggcagaagaaatgctcatgaacgatatgcccgttatcccgctcgtatttatgcaggacgcgtatatctacacagacgttctctccggcatcggctccgactactatgcgacaagaaacttcaagaagacaaagatgaaggattacatgacgtataaggcagctacggataacgccgaagaaacaacagctaacacagagacaaaagcagctcagtaatttaataaaaattcctaaggatactctgaataaatcggatttttgcgataaaaggctgaaatataggggtttttatcgcaaaaataaccttacatcagatgcttcctaactaatgaaacggggagaacatagacttcccgttttatttagttataaagtcgaaaaaagaaggaggcagacccgttttgtcctaatttgacgggacgggagctattatgccggaaacatttcactcgccgcagcaggtgaaggtatttattttgtatctgcttgaaaaagtaggatatccgcttgactataacgacctcgcgacaataatcatccgcgacggttatgtagactattttgactttgtcacatatttccatgagctgcttgaagacggacatattaaaaaaataagcgttccatgtgacggcgcaaaagataaaccgagcgaacagaaggatgagaacggcgttacggggcctgataattcctccgacaacgacgctcagactaaggatttgtacgaagtcagcgagaccggacgaatgatagcgaaagggcttgccgacgaccttttgatagcggctgtacgtgagaagagctacatctccgcaatgcgtcatttgtcactcgaaaagcgcggcgcagtcgtggatcaccgtatcgagatggtcggggacggtacgtacatattccactgctcgataaaggactgcgacggaatggcgtttgatcttgcgctgagagcggattcataccttcaagtgtcgcgaatgaggatgaatttcgaggataaaccagacgtcgtctaccgcggaattatcgctcttgtgacgggaaacgtcaattatctttttgaaaaataagctgtcgacattaaaccagttaaactataaagccatttggtataatgaattatatgtgagacacgattgaatttgtgtaaaaaatcaaaaatgtctgaaataattgtaaaaacctattgacaaattataattttatggtataattgttacagtgtaattataattcttttcggagttctgctttgaaaaacgagacgttatcgttgcttgataaaataaagacgggcgacgagagtgcgttcgatattcttgcaaaagagtatgaaggacttaccgaggctgcggtgaagagatttcttccgtcgtttgatatacgaaacggagaaaatccggtgttcggcgaggaagatcttcgacagtgcgcggctctggctctgtttaaggctgctcagacatacgatgaaggaaaagaagtcagcttcggactttacgcaaaaatttgtgtgaacaacgcgctgatatccaccctcagaaagtataaaaccgagcaaaaaagacagcgtcgtgctaaggaaagggagaataaagctccagccgatccgattgccgcactaattaacgccgaggatgacgaaagactcaaagcaaaaataaaaacagaactgtcagattttgaaaaaagtgtattcgacctatatattaatgacaagtccactcgagaaatcgctgagatactcggacgcgaagaaaagtccgtcagcaacgcattgtaccgcatgaaggttaagattaaaggacttctgaaaaattaatatcgtatttcaccgttcagcgtaacggttagaaataattcgcccgtatagcttaactcaagagcgttgttgtcaaaggtgacgtttagagtccgccgagggcaaaaaaatcaaccaattctatttcaaagcgaggaaaaagagatgttcgaggacaagactttagtgtgcaaggaatgcggcaaggaattcgtattcacagctggtgagcaggaattctatgcagaaaagggcttccagaatgagccccagagatgcaaggcatgccgtgacaagagaaagaatgcaggccgtgaacccaaggaaatgttcacaactgtttgcgctaactgcggtaaggaagcaaaagttccgttccagcccagcaacgacagacctgtatactgctccgagtgctttgctgctatgaagcagaaccagcagtaatttgagttttagtcttaaataaatactcgagataaagggaatgctgaaatatgcgttccttttgttgtttcggagataatgaagacgcaaaaaagcacctcaactttggtcaaggtgcagttttgtgtcttttattttattccgcgtaccgacattatatgaacaacttccgtgtcccacagctttactccgcgcgagagcatgtcaagccgtctgtcgaaacgtgaatttatgctgtttttcatctccgcagtttcctcggctgatactaaatcagcggcttttgcttcgatgaatgataccgcgtcaagtgcgcactgcctgtcggattctatcattctgcgcgacagctccggcggatatcggttgtcgtcgggagtcagacttagcgtgatataatcggttcgaacatcgcgaaatccggctttttccatagcaatcggatgctcctgctcgtttttagcgtattcgccgattgaaataccatttcgcaatgtacgaaatctttcgtcaactctgtcccagatatatttttcaagctcgctctcttctgaaacaatgtcggacggaatcataacacctttccttgtcgagagtatgagacaaattccgccgtttttcagcacacgatactgctctccgtagaacttttcgggtgcaatatgctcggagactgtgtttgatatcgtaacgtcaaacgaattgccgccgaagggaagtgcggtcgcgtcgcctactatgaactggcagcttttgtcgtgagcgcgtgcgaattttataaaactctcgtcaaaatcaagtcccgtcacggcagaattcgggtaccaacgcgacaatgaggaacagagcgcacccggaccgcagccgatttcaaggattctcgcgccgtcgggtatttcaaagaccgaaacaaacttctcgcggaaacagtcgtcaaatcttacgcatcggcttgtgtagagagttccggctttttgaacaaattcagaccagatactgctcatttgcggttcgggtcgaagtcgtttgtgccgtctccgaggtaccagtcgtagcggacaaccttgccgtcgatttcccacaccgtaggatattcgttttccatccagtcgagcgggcggcagcggttcgtctgaactgagtttactgcccatccttcgcgcaggtcgttaagctcggattcggagagaacgcccggcttgcaggagatgaacagaggggaaccgctctttgagagaacgtcgagccactgcttgttgagagtccagtctatcgcgccggtgattcccacacagtccgcgtcagtcatgtagaacgagccgttctgaatcattctgaatgcgagagtgtttacgcccatcttgcgggttctgccccagtcgtagccgcttgtgtcgtctcccgttctgttgagactgtacagacccgccacaaggtgcgagaacgtgttgcagcctatgataacgcagtcctcacctgcttcttcctgaacggcgcggaggaagttcagagtaatctcagccgtagttctgcttctgtcgcggaagtgccagccgtcgcgcataatctgctgtctcatggcaaaaccgaactgaccgcagatgtcgcaggaggagaagtcgtgcttgataagctcgtaaccccattcgcggagcattcttgtcacacgtctgacgtattcgatgacctcgtcgcatgaggggtcgaagtagttcgcgtcgcggagcatacggcattcttcgggaacggactttacttcgtgatgtgagtccaccagatatctcacccagattccgggacgaactccgagctttctcatctcatccgccagagccttcatgtcgtggaacgtgtctctcagctcatcccaaggaccgtcgcagccgtatttctgccatccgtcgtcgataaccatgtagggtatgttgtcaagtcccgcgcatctttcggcaacgagctttgtgtcggagattatctcttcctgtgaggatcttccgtaagcgtagtaccagttgttcgagccgtaaacgggatgcttcggcaggtgggatgtagtcgggcacatcttcttgcagaacagcacgcccgcgtcgaatgcagtcatgtctctgtactcgccgaatacgatttcgcagaccgtcagctcacgaccggaaagaattacgccttctccgccgtttctgatgtctgcccacattgtaattccgcctgcgtcatactgccatgtgacaaacgaggacggctgaacctttacgccaaagccttcggtgaatctgtcgccgacttccttttcgaggtcgcttccgtttgatacgagtatgtaccacggcatgattctgtccggtgttattcccatccacgcgagattgccgtagcctctctcaaacgcgtctccgagtatcttaatgctgtcatgtcgtatttcgtcctcggtgaagttaaaacgcagcttgacgtatttcagcggggtagagtcagccttaactttcagcgccataacgtcgttctcgatagcgagagaaagagctacgtcgtccgctgacatattgcctttttcaaatttgtgactgccgctttctgtgtaaacaacggcaaagtcggggtatcgcagtttcatatatttcctccgaatatcatattcacgtaagattataacagtattttcaacgagaatcaagtcatattaacaaaaatatccccatccgaacattttttactatgccggatgaggatatctttttattcagctcagcctacgcttgataccttgtaagcctgatacttgttgccgtttttgtcggtgagctggagatagaatgtgctgtagtctctgaagagattgccgagtccgccgaatgaggggagcttaactctgcaagttacaccctctgtgcattcaacatcagcgtattcctgaacatcgccgtttgttacgataaggagtgtgattgtaccgtcgctgtcgggacgaaggagaacttcttcatcgctgtcatcatatacggtgaatccgtagccgctcttgtttgatccgtcgtcgaaggaaggagtgtcgccgccgcttgtgttgccgtttgaggtgtcaacaacagtgtagggaaggaattcgccgtctaccttgaacgcgagaacaagatatgcgtacttttcgccgcttacatagtggtcgtcgcctttggagaggttctttgtggaggaagagtttgcgctgtcgtaaagtgcttcaaattcgcttgtggatgagggaagagcggacttcttgtctgttctgtagtagtagagcttgccgtcgtagagtgcggttaccttgaagtctccgtctgaatcgggacctgtgatagtgaagcctgagcctgcgttggacttgccggaagcgtctacgtcaagcacataaggcgtgtagatagtgtctcttatggagtctccgtcacggtatgcgatgatgatgtaggggtatctgtccaggatgtcctcgtcataggagaaggaagccacaacgccttctttaacggtaactgagccgcgtctcgtctttgctgtatcgtcgtaccagtcaaggaagtcgtctgcggaaacgttggagtcgtctctggagtagaagtagagaacttcgccgtcgccggttgttgtgaagtagattttaccgtcctttgcgtagggaagaatcttgaatccgttgtcggctgtgctcttgagagctacgagaacggggctgtaaacgtttccgtcgtcgtcggtgaatctcagagccatgtagggatagctttcaacataggaagccttgaacgaaatggacgcgtatgtagtggaacaggtctttgatcccttgtacttagtctgcgcgtcgtcgtaagcctttgtgaattcttcgatggagggagcggagttagccttggtgtagtagtattctaccttaccgtaggtttctgttctgaaggaaattgtgttgtcttcgtcaagctcgggctcgtttctgaagccggtggtgaggttgatgttgactgcaacaggctgcatatactcgccgtcggagtttcttattgcgagaatgaggtaaggatagctgtcgatgtagttttggttgtatctaagctctgcggcagtgcctttctttgccgttaccttgtcggaatacttagctccgttgtactcggacttgaagtcggaggctgtggggaggttggcgttttccgcgtaatagtagtagaggtcgccgtttacgcttgccttgtaggtgataatgcctgcggtcttgagtgcgggagcttccgtgaatccgttgtcgcccatggagagaactacaggtgcgtagtatgtgccggaggaggactggaacataagagctacgtaggagtaattcttgaggtagctgtccttcagacctattgtgccggaggagataacgccaactgtgtcagaacccttgagtgcgccgttctgcttctcatacgcggagaggaagtctacctgagtgagagtggagccgttttctgcgtagtaccagtaaacagtaccgggccttgcggtcttgtacttgattgtgtttgagtcggagaggtatggagcggtttcaaatccgctgtcgcttgctgcgagagtgttgtcgatgaggtaaacggggtacttcttggtgccgtcctggagctgtactacaacgtaggagtagttctttactgcagatgctgcgtatgtttcctttgaagtgggagtgtttgccttaacgtcgaagctgcttccgtgtgttgccgcagaatagcttgagttgaacgcggagattgaaggagctacggcattgtttgtgaagtaatagtaaacagtaccggctgtatttgattcgaggttgaggtagtaggagttcttgtcggcggttacgaaaggctcaattgtgaatgatgactgagcgtcactgttgccggagtaaaccgtacctgcgaaggatgcgctgaggttgttgccgatttcaaattcttcggggagcattgcagaagagaatccgtctgcatagatgtaagcggatttaatcttaccgttgcctgtaaccttaacattgtccgcgccgttctttattgtgatttcctttacggtggtgttggagaggatgcttatctcgcatgacttttcaactgtgagagaagctatttcggagccgcttacaacggagattttaccgccgccgagagcaacaacattttcaaccttgcagttgtcgaatgttacgttagccgagccgcggatgtagagagtaccgtttatggtgcagccgttgaatgttactgtgccggaagatgcgccttcggtaacgatattgcgtccgttcatcttgatgccggagatggtgatgtcgccgcgggtaacagtgttgttcgtgctgtgtgcgccgctgtctctgttgtacgcgctggtgttatagatgcaaccggcagctctgtagagtattgtgagagcttcagcacgcgtgagagtcttctcgggcttgaaataggtcttgccgttttcgttgtagccgttgatgattcccgcgtcgattgctctgaggatgtagtcgctgtagtaggaagaaatatcaccgaagtctgaaatcgcgccggactgtgttgagcttgacgcggggaggtcaagataacgcacgagaagggatgtagcttcctgacggcttatctttgtgtccggagaggcgttgttaccgtagttgagtatgtagccctgtgcggcagccttagcgaagtagggatagtaccagtcgcttgacttgatgtcgttgtagcttatggaagttgtctttgtaagaccgaaggtttcgtcgagcattttgatgaactcggaacgcttaacctcaccgtcgggcttgaagctgtatgtgccgttgtcgtttttgtatccgttaagcacgcctttttcgacgagatacggaatctgaccgttagtccatgcccagtggtttgctacgtcggtgaaggtgatgttggcagctcccgcaaatactgcgcaggagagagccatcattacggcgagcactacggacaggattcgattgaattttttcatatatcctccgtttttatgaattgaaatatgctgactttcatattatagcacatcccgtgtgattatcaagagcaattttgtgccgctttataaataataatgtaaacaaaatccgacgccggcaaaatccgctctcatatctgctttgatagacgagccgcaggtgcaaaaagttccgaaaaacgcgcgaatattcacccgaaattcaatctgctgtgtcatagttataaaagataaggcaaaaatacaagcttttgaatacttttgtccattgactgattgtaaaatatatgatatattctttcatgtatcaaaaaacgaatcggagactaacatgaacttttctgaatataaaaacgtgaagataataaccggagagggcgcggttaagaagaattattccgtgttctcctctctcggcaaaaaggctctcgttgtgtcgggcagaaacggcgctgacaaatgcggagctatggctgatgttgccgctgctctcgatatggcgggagtagactacgtcagatttggctgcattcccgaaaatcctccggctgagctttgccatgagggcggaaaaacagcgcgagagaacggctgtgatttcattattgctatcggcggaggttcttctcttgacgcgggaaaagccatagccggatatgccgcaaatcccgactgcgctcccgacgatattttcgacgacgagaagagaacaaacgactgcctgcccatcgctgccattcccacgacctctggaacaggaagcgaggcttgccgttattccgtgctcactatcgaaggcggcagaaaaaagaagaccttcaagcataagtcagcctacgcaaagtacgcattcgtatgcccggagtattcctccacaatgcctgcgctttacaccgtgtcaaccgcacttgacgcacttgcgcattctatcgagtcgtatctctcgccgaaatctactcccgaatccgaagaagccgcactctacgccgcacacgagatatgggacgtaatattcaacggaaaaggtgtgaacggagacgaatattcccgtgaagcaagggagagtttggcatatgccgcttgtgccgcaggtatcgcgatagactataccggaacaggcttcccacatcccctcggctacagcatcacactgacaagaggaatacctcacggaaacgcgtgtgctgtgtttgagggagcgtaccttacatataatatgctcaccgacgaaggacgcgcgaagacagaaaagctcgccgcgcacctcggaacaacgccggaagacatgataaaacgcattcccgagaagagcggagttgccgaaaaggttggaaaaatacccgaggacgaaagagaagagcttatcgatcgcgttgccggtgcggcaaactatcagaacagcccgtacgtcatctcaaggggagaaatgagcgatatttacacccgtattttcggctgaaaaatattgcgctaatttgtcgcttccccttgaaaattccgcgccgatatagtataataaagcgaataaaattcagatgaagggacgtaaaaaaatgaatccgaatacttttcacgttgtagaccacccgctcatcaagcataagctcagcattatgagagaaaaagacaccggctctaaggatttcagacagcttctttccgagattgccatgctcatgtgctatgagattacccgtgacattcccgtagttgacgttgaaatcgaaacacccgtatcaaagatgatcgctcagaaggtagagggcaagaagctcgctatcgtgcctatcctccgcgcaggtctcggtatggttgacggtatcctcacacttgttcccgtagcaaaggtaggacacatcggtctttacagagatccgctcacacataatcccgtagaatactactgcaagctcccgcaggatatcgaggacagatacatcatcgtctgcgaccccatgcttgcgacaggcggctcggcttccggcgctatttcaatgctcaaggacagaggatgcacccagataaagctcctttgcctcgtagcagcacccgaaggcgttgaaagacttcagcacgaccatcccgatgtacaaatctactccgctgcacttgacgaaaagctgaacgatcacgcatatatcgttcccggactcggcgatgcgggagacagactcttcggcacaaaataatacgatatcagtgacataggcggggagatgattttccctgcctttgttttattttcgcgaaataacgcattaaaaggagaaaaacggtatgcgagagttcaccgtgaacaaaaacgacgcgggacagcgaatggacaagttcgtctcaaaggtcacgacaggtcttccgaaatcgcttctgtataaatatctcaggacaaagaggataaagctcaacggcaaaaaggctcacgaaaacgacttcaccgcagagggagacgttgtcgagatgtacataccggacgagtttttcggagatacggagactgcggaaagctacgataaagtaaaatacgtgccggatatcgtgtatgaggacgaaaacattctgctgtgcgacaaaaagccgggaatgctcgtgcatctcggagatgagggagaccgtaaccgcgcagaaggctcagaaaaagagacgcttatctatcttctcacggcgtatcttgtgaacaagggcgaatatgacccgaaaaacgaaagctcctttgcgccggctctgtgcaaccgcattgacagaaacaccggcggcattgtaatactcgcgaaaaacgccgaagctctccgactgatgaacgaagcgatacgcgaaaaccgtgtgcataagaaatatctctgcgcagtccacggaaagctcacgggagagaagacgctcaccgcataccaccgaaaggactacaaaacaaacaccgtccgcattttcccaagtgaagttcccggctcgaagaagattatcacaggctaccgcgctctctcgtacagtgggaagcacgacctcactctgcttgagattaagctcatcacgggaagaacgcaccagataagagcgcacatggcgtacatcggtcatccgctcctcggcgagggaaaatacgcacagaacgcggcggacagaaaaatgggatattcgtctcaggcgctttattcctattcggtgtcctttgaaacgggcggtgcgctggaatatctcaccggacgggagttcaaggtcgacatgagccacatacctttcctcgcactatttagtacgttgcttggcgatgttaaagcgtgagaagttttctgtgaaatatttttatatttgtgtgccgacacgagaagaaaattataaaaacgacttgttttgttgaagtgaatcggttataattatataaattgttgaaactcagcgacaaacaacaggagaatatgatgtcatatacattttccggaggaatccacgtagaggaatacaaaaacactagccggagcaggattgaaatacttcccgagcctgacagtgtaaccgttcccatgcttcagcatatcggcgctcccgcaacacctgtagtaaagccgggggactatgtaacggtaggtcagaaaatcggagacgtacccgagaacgcactgggatgtcctgttcattcaagcgtatccggcacagtccgcgagataataaagaagacggttccgacaggtgctgtagtggagcatatcgtgatagacaacgataaacagtcgacgatgtgtcccgatataaagcccgtcatgaaaaagctcaccgaatgcacgaccgacgagataatatctataatcagagaagcgggaatctcaggcatgggcggcgcggcgttcccgacatacgcaaagattaaatccgctatcggcaaggtcgacaagataatcataaactgtgccgagtgcgagcccttcatcaccgcgaaccaccgccttcttctcgagcaccccgcgtcggttgtcaacggcataaagatacttctcaaagctcttgaagtgagatgcgcatatatcgcgatagaggacaataagctcgacgcggcggaaaagctggaggagcttcttgcggactccaaaatgatatccgttaaaataatgaagacaaaatacccgcagggcgacgaaagacagctcatctacgctctgacgggtgtggagataccgaccggtaagctgcctgccgacgtaggatgtgtgatattcaacgcagaaacctgctcggcaatatacaaagcttttgcgtacggcacaccgcttacaagccgcattatcacagtggacggtgactgcgttaagcatccgaaaaacatccttgtgccaatcggagcgaccttccccgacattttagcgttctgcggaggactgaagcgtcagcctgcaaagctcatcagcggcggtcccatgatgggtatggctcagtgggatgaagaaatgccggtgacgaaatcgacgagcgcgatactcctcttctcggacaagttcggtaagaagaacgtcgagcacccgacctgcatccactgcggaaagtgcgtgaacaactgcccgatgcacctcatgccgatgtatattgcgcagttctcgatggtcgacgactggaagagagcggaagaatacggcgctatgagctgcgttgaatgcggatcatgctcgtataactgcccgggcggcgttgagatagttcagcacattagaaaagccaaggctgcgattaaggctgaggcggcatggataaaatcactcaaacccgatgcgtgatgaggtaaaatatggataacaacgaaatgaatcagaatgtacagactacggagacaaaaccgcgcttttccatgcctccgttattaaaagtacagtcttccccgcatataaaaagccccgagactacggcgaccgttatgcttgacgtgcttatcgcgctcattcccgcgttcatatggggagtgtatgtgttcggtacgcgtgcgcttgtgataggcgtgatatcggtggcggcggctgtcggttttgaagctctcacacagtttctgctgcacagaccggtgacagtatccgacctttccgctgccgtgacgggactgctccttgcgatgaacctgcccgttgccgttccgctttggatgcccgtcgtcggagctttcttcgcgatagtcgtagtaaagcagcttttcggcggaatcggcaaaaactttgtcaaccccgcacttgccgcaagagtattcctcttctcatgggcgggagatatgtccacattccagaagttcggcgaaaagattaactccgcagccgtaactctgacagagggagatattgtagccggagcaacgcctcttgcttcactgaaacagggagtaatccccgacgccaacatattcgatatgctcacgggcaacatgggcggatgcataggcgaggtttcgtccattctgctcatagccggcggaattttcctcctcgtcagacgcgtgataacatggcagatacccgtcgcgtatatcggaacagttgcgcttgtcacattccttcttccgaagggcggtggaattgcggctgacttcatgctgtatgagcttctctccggcggacttatgctcggcgcgatattcatggcaaccgactactcgacctctcccgtgacgccgaacggcagacttctctacggatgcggatgcggacttatcacggtgctgatacgctacttcggaagctatcccgagggagtttcgttcgctatactcattatgaacctgctcgtttggtacatagacaagctcacaatgccgcgcagattcggaggtaaaaggtaatgtccaagaaaaagaaaaaaataaacaacactgccgaagaaataaagggcgtggtgactgagacagaggtcagccttgacgagcttgacaaattcgagccggatgtaaaagaacagcaccacactcccgaagccgcgccgaaaaaggtcgaagaagccgacaacagcgagagcataaccgaagaggaagaagttcacgatttgattgaaggcgacttaattgaggactttgactatctcgaagacgatgttcccgaagagagcgcggaagaggcggttgaagaagtcatagaaaacaccgattctcagccgaaaaaggaaaaaaagccgaaagagaaaaaggaaaagaaagctccgcgcaaaaaagaaaaaagcgaacctgaaaccgaaaaagctcccgcggagggaagtacagcatatactgtgcggatggtggtaatactcgcggcaatatgcacgggaatcgcactgcttttgtcggtcgtgaatatgctcaccgagaacgtgattgctgaaaacgtcgtgaaggagcagaacaaagccgtgctgagcatattccccgacggagaagaagtcaaggaatacacgctcgacagcggagaaacagtctttgccataataaaagacggcggtatcatcggatgctgcgtcaactccgtgggaagcggatacggcggagatattaatcttatggtaggaatcgacacggacggcaaggtcagcggaatctcgtttgtctccatgtccgaaactcccggcgtcggaacaaaggtcaaaggagagggattcgtttcacagttcctcggactgagcgaaaacgcagtgattggcgaaaacgttgacggcatatccggcgcaacattcagctcaaagggtgttgccgaagccgtgaacaacgcacttgcgcttggtatcgactttgaagagatggcaaagaatctcagtgaagccgtaacgataggcggggaaaacacggacgacttccataactccaacgaagacaacggcgaagaatcaataaaagctgaagaagtcgaagaagccgagacaactcccgccgaaacggaaacagaaaccgaaactgagcctgagaccgagccggaagttcccgttatagcagagcctgagacagaacccgaaactgagactgaaacagaaacggaaacacaagctcccgagacggaacccgagacatggattcccgagacgcagcctgagacacagacaccggaaacagagacacagccgccggaaaccgaagctcccgagacagaatccgaaacgcagcctgagacacagacaccggaaacagaaactgagactgaaacacaagctcccgagactgagaccgagactgaaacagaccccggcgagattgaaattgagatagaaacagatcccgagacggaaaccgaaacggagactgaaaccgaagaagaaacggaaaccgagaccgagacaaaatgggtcaagccgtaagcggaaaggatgatgaaatatgaaaaaatcaatacctcagctgtttcgtgacggcataatcactaacaatccgacgtttgtacagcttctcggaatgtgtccgacgcttgctaccaccacatccatagtcaacgctctcggaatgggagtgtcggtaattgtggttctggcgttctcaaacctgtttatctcgcttttgcgtaagataattccaaaagatgtcagaatcgcgtcgtacatcgttataatctccggctttgttacggcagtggagcttataataaaggcgtatttcccctcgatagacgcgtccctcggactattcatcccgctcatcgtggtaaactgcattatccttgcccgtgcggaagcgttcgcgtcgaaaaacggtcctatagaatccttctttgacggcatcgccacgggaataggttttacactcgcgctcttctgcatagcattcgtccgtgagcttctcggaacaggtatgctctttgcttcaagcgacggtacgggcggagttaagatattcggagactggttctcccccgcgacaatattcctcatgccgacaggtgcattccttacgctcggattcctcgttgctctcgtgcagaagctgagatacaaaatcggtgaaagacagcgcaaaaagctccttgaagccgacgccattgagaacggatatcatcagaccataatgaaagaccccgaaaccggcaagctcgtccgcaaagtaaacgaaaatgaagaagaggaggcggcaaaatgaatatactcatgataatgttcacggcaattcttaccgaaaacttcatcttctcgagattctatggctgctgtccgttcctcggagtatcggataaaccgtcgaccgcactcggaatgggtatggcggtaacgtttgttatgacgctctcgtctgcggctacatgggcggtgtacagattcctgctcgagccgttcggactaaaataccttaaaactatcgcgttcatccttgtcatagccgcgcttgtgcagtttatcgagatgttcctcaaaaagaacgtgccgtcactgtactccgcgctgggtatctatctgccgctcatcaccacaaactgcgcagtcctcggttcagccctcgtgaatatcgaaaaaggctacaacttcattgaaagcgtagtgttcggattctcggcagctctcggattcactatggctatcgtggttttcgcgggagtgagagaaagactgaacttcgcagatcccccgaaggcattccgcggattcccgcttcttctcatatccgcaggacttgtggcaatggcattctccggtttttccggaatgaaattctgacggaggtgctttatgaaaattttacttcccgtactgatattcataggactcggacttctcatgggtgctctgcttgccctcgcgtcaaagctgttcgccgtcaaaaaggacgagaaagcggaggcgattaaggaatgtcttcccggcgctaactgcggaggatgcggatattccggctgtgacgcttatgccgctgctgtttctgcgggtgacgctcccgtaaacaaatgctctgtcggaggtgccgaagccgcttccaagatagcgcagataatgggagttgacgcaggagagcaggtgagaatgagagcgcaggtcatgtgttccggaaccggcgaatacgcaaagaaaaaatacatatatgaaggaattgacgactgcgttgcggcttccaaaatcggcggcggcgacaaaatgtgcaaaaacggctgcataggtctcggaacctgcgtgagagcctgtccgtttgacgctatagttgtagaggacggagttgccgctgtagactattccaagtgcaaaggctgcggcatatgtgtctccgcctgtccgaagggaattataaagctcatcccgtttgacgcaaagcactgggtgggatgtatgtcggtcgacgacggaaagaacacacgcaaggtctgcgacgtcggatgtatttcctgcaagatatgtcagaagaactgtccggcaggcgcgataaacgtggacaacttcgtggcgtcaatcgactacgacaaatgcaccggctgtgatatctgcacagacaaatgtccgcggcatatcatctggtcgggcgaggttcagggcaaactcggacttgtgattaagcgcgtaggcaaaaactgaaccgtgctataacaaaagccgatatgactttatgcaaagtgtacatcgaatgacaagaataattatgcaacgtgccgaaatgaaaaattcgggcaaaaatgtgctttttatctcttgaaaaagacgaaaaaatgttatatcatactctaagatgaaagctttgcggcttcactatttaaacagaaattttttaatccggaggataaataaatggcaaacgcatcagacatcgtaagagtcggtattatcggctgcggcggtatcgcaaacggtaagcatatgcctgcacttaagaaggttcccggcgtacagatggttgcattctgcgacatcatcgaagaaagagctcagaaggctaagaaggactacggtactcccgacgctgctgtttacacagactataagaagctccttgaggacaagactattgacgtagttcatgttcttactcccaaccgcgctcactccttcatcacagttgacgctctcgaagcaggcaagcacgttatgtgcgaaaagccgatggctatcaactccgaagaagctaagaagatgcttgacgctgctgaaaaatcaggcaagctcctcacaatcggttatcagacaagacagaccgctcaggctcagtacctcaaggctgaatccgagatgggcacattcggcgacatttacttcgcaagagcttgtgctgtaagaagacgtgctgttcctacatggggcgtgttcctcaatgagtatgaacagggcggcggtcccctcatcgacatcggtactcatgctctcgacgtaacactctggatcatgaacaactacaagccgaagtactgcgttggtactacatatcacgctcacaacaacgatacagaacagggcaacgactggggcaactgggatcccgcaaagttcaccgttgaaagctccgcgttcggcttcatcgtaatggaaaacggcgctacaatctccctcgacgcttcttgggctctcaacaccctcgaacctcgtgaagcttgctgcatggtatgcggtacaaaggcaggcggagatatgttcggcggcggcgttcacatcaacggtatccgtcagaacagacagtacaccttcacacccagcttcagtgcaggcggcgcagctttctatgaaggcgtttccgacaatgaccccgcaggcaaggaagcatatcagtggattcaggctgttcgcggcgaaaaggctcagcccacagttcttcccgaacaggcttacacagttaccagaattctcgaaggtatctacacctccgctaagaccggcgacatcttcaagttctaattttaataagtatagtgaaaaggtggagagcttctcttcgtcttttttcgtggaggatacattatgagccgcagacttttttgtgagctgtcaccgcttgcctacaacatttccgttttcaagtgctgtaccgaaagacggataaaggatttcttcagcggagagcgattcgcgagagaaaaaaggagtgaaaagctccccgtcgtcatatataagcataactcactaatcagaaggacgctcggaaacacacagccgcagcttcaggaaaacaaagccgtgaatctcgcgctgactgctccgaaaattaacggaatactgataaaacctggcgaaaccttctcgttctggcacctcgcgggcaggcttaccgagaaaaaaggctataaagaagggcttatgatatcgaacgcaaggtcagtctcgggcatcggcggcggaatgtgtcagttcaccaacctaattcactggatggtaatgcactccccgcttgatataaccgagcatcaccaccacgacggatttgacctgtttcccgactttaacagacaagtgccgttcggaacgggaacatcaatcgtgtacaactacctcgactaccgcttcaaaaacaacacggacaacacatatcagctcataacatatgtcacggatacgtacctctgcggtgagctgcgagcggaaaagcctctcgacgtgaaataccatatagcgtcggaaaacgagcattttgtccgcgaagacggcatagtatatcgaaaagggcaggtatacagaagttgtattgacaaaaaaaccggcaataccatatcacgggagcttatccgagacaaccacgctaaggtaatgtacgacacgtcggcgcttgagataacggaagaaaactgacaggcacaatctattcaaataaggcggagcttttccaataacggaggagcatcgcctttttttggttaattgattaattattatataaactacaaaaatagcgtattggaatttagttgaatgtgcaaatagaatttttgcggtaaatatgctacaatatatacaaacaaagtctctttttgtgaggtaaaagatgaagaaattaaccaaaaacaccatatcgctgattcttgccgcaattatgctgtcgtccgcttttgtgtcatgttccgaaaaaccgcaggacaaaaccgaaaacaaaacagccgaaagtcagaacatatccgccgaggaaagcgaaaccgcggagacggaagagggagagaagctcgacataccgttcactgactacgagggatataccttcaacacgctgacaggagacaatgttacgtacaactggcgcgagcttaccgttgaagagataacgggagagcctatcaacgacgcgttctacaaccgtaatctctgggttgaggacaagatgaacatcaaaatcacatccgtagtcaacgcgacaggcggaaacacaagcgcgtttaaaaactccgtaaactccggagacggtgcttatgactgcgcattcatgaacttcaccgacgcttcccgtactgcgacaggcggctactgtctcgacataggcaccatgccatatgttgaccttgataagtcgtggtgggacagagacgcgagggaacagctgaaggtgctcggtacaaactaccttatggcttccgacatcacgataggtgacaaggacgttatgtgggttctgtatttcgataagcagtattttgaagatctgcaccttgacgatccgtataagctcgtagctgacggaaaatggacgttcgatacgttctacgacatgataaagcagggacttctcgaccttgacggcaacggcgtgtacaacatgaaggaccgctacgggcttcttacacacggtgaaaactatgccggaatgtggatgagtgcgggtgaagctcttatcaagctcgacgaccggaatgttccgcagatttcatggggcagcgaaagattcagtaatgtgtgggataagatagctcagataatgggcgaccccgcagtatacggagacaatattgactttatctcctcagggttgcgtgaaggaaacgcactgttcgcaaccgaggttgtagccttcatcagaacataccgtgaaaacgaccgcgaattcggaattcttcccatgccgaaatatgacgaagcacaggacagatactacacatatgtggcggtaaattccgaccttatggtagtcagccgcaccgttaaggatgctgctcgtacaggcgagatacttgaagttctggcggcgaagggcaaagaaatgatcatgccggaatactacgacgtttccctaaagagcaaaggctccagagacgagcagagttcagcgtcgcttgatataatcttcacaaaccgtatgtatgacctcggtgtagttttcggatggggcggagttataaacgctctcaagacgccgaacgccaacatcgcttctctttataaaaagtacgaaagcatcacgaacaagaccatgaccaaggacctcgagaacatgacgaagaactgaggatactctgaattaaatcggatttttgcgataaaagtctaaaatataggggcttttgtcgcaaaaataaccttaaatcagaggcttcctaaggatactctgaataataacctaaaatcagaggcttcctaacaacagtttacataaacccacttgtaattccgagcgcggtgtggtataatttttccatcagaaataaatccacacacgaaaggaaaacaacatgaaactttgtgttcttgctaacctttatgcaaagaagccgcttgacgaagctctcgctatcttaaagagccacggcgttgaagctgttgaaataggctgcggcggttatcccggaaaggatcacgccgatcccgatgtcctcctcaacgacgaaaaggcttttgaagaatggatgaacaccttcaaaaagtacggcatcgaaatcgcagcactctccgctcatggaaaccccgttcatcccgataaagctaccgctgagatgtacgacagagacctcaaaaacgcgattcttcttgccgaaaaagcaggcgttgaaaccgttgtaggcttctcaggctgtcccggagatcatcccggcgctaaatatccgaactgggtaacttgcccgtggccggaagacttccttgctgttctcgattatcagtggaacgaagtcctcatcccctactggaaggaaaccgtaaagttcgcggaggagcatcatgtacataagatcgctctcgagctgcaccccggcttctgctgctacaataccgaaactcttctcaagctgagaaaggctgtcggcaataccatcggcgcaaacttcgacccctctcacctcgtatggcagggaatggaacccgcagcggctatccgtatgctcggcgacgctatctatcacgttcacgcgaaggatacaaaggtcgaccccatcaataccgcacgcatcggtgttctcgacacaaagcactacggcgacgaaatcaaccgcgcatgggtgttcagagcgctcggatacggtcacgacgttgcatggtggaaggatctcatcagcaacctcagacttgtcggatatgacggacctatctccatcgaacacgaagacagccttatgtcaatcgacgaaggacttacaaaggcagttgaagtgctgaaggaagctatcatgcacgatcccaagccgacaactatgtcatgggcatgagtaaatcaaactgaataaaatttcagcctgaaatacgttttatagcgtaaatcaggctgttttttattttatttcaccgaatccgcagacaagctgaccgccgaccgtttcaatcagcgcaaacgacttgtgaaagcctgtgccgcatgagccgggatttatgattctgacagagcctttgagcgagccgtcaagctgtgcgtcctccattcggtgcgtgtgtccgaagaacaggcagtccgcgcccttttctatagcgtgatccaccgcttcctgataggtatacttcacgtcgtatttgtgtccgtgcattagaaggaatttccgcgcgccgactgtcactatcttttcgtaggtcgtgtcggtcagttcatcacgaacgtcactcggagcgtcgcagttgccgagcacacagtcgaaatgcagagaggggaactcgtgcgtaagctttattatgtcgcgaatcccgtcgccgaggaaaaatactccgtccagtttgcctgcttcaagatttaatttgataattcttctcatagcgtcggtgttgccatgagaatccgaaaaaacaaggtatttcatttttaatcctttatatattgtcaagtcggcgagcgggcgaatatactgtaagcagtcagcgaaaatattcggagggaacaatgcttaacaaaaacgctatagaaaaaatgctcgagatgcccgatgacaagttcattatgatgcttaatttagtgctcggcagtgccggaattgacatgggaagcaaaaaaatcgacggcaagaccgtgaaaaagatacgcgcgctccttaaagaggtaacggacgacgacatagcgcggctcacgtatctggtgggagtgtacaacggggtgtgaaatggaaaacgatatttccggaatgatagcaaagataatacaaaatcccgagttcgccgatatggttaaggagatacgcgggggagacgaaagcacggatgaagtccaaaaagagatgatggaaaagctccctggcgtgctctcgatggtgtctccgcttatcgggggaaacgcttccgagggggagacaaaggagaagagcgagggcgaaaaatcggaagaaaagcctgcacctccgaaatacgacaaaggcagagcggaaaagctgatgggcgcgctcaagccgtatctgaagccggagagacagcagattatcgacaggtgtatgtcggtcatgcagctcagcgatgttatgggagcgttcggcgggcttgatggtcttatgggcaagtcgaagtaaagtgaggtgagcggtatttatacgcgggatttgaggaaaaatcgttactctccgcctcctggatacgacggaaacacgttcaaggactggaaagatgtgtcgggcatgagcggcgcttcggcgagattcacggcacagcgggatgaaagcacggaagaagaatacacgccggaagaagatattcttgaaacctctgccgaagaatatgcggaatatcagcaggaacaaccatccgcacaaccatcaaatgaagtgcttcaagatgaagtctccgcatctgcaagcgcaaaggctcacgagaacataagcagtctcatagaaaacctgcgcggcaaaatcggtcgggaagagcttatcatactccttgtgatgttccttatcgcgagtgacgggatgtgcgcggaggtgcttattcttgcgcttgtactcttagccgcgtgaatggaaaaaatccatgattgatacggcttccgacagcgcgggaattatgatggaatacgggtcggaatacttgaacgttacactgtcgtcgattgcgtgagcggcttttatccttatgctgagcctgccgttttcgcttcttacggtgggcatgaagtcaagtgcgtttgctattgctccgagagcggaggcggtgtatctgaggtcggggaaggtttccgctatttcaagaaaactgccgcagtcgctggtgagggcatagcttgtagtgcatgagaaatccgcgataactccgtccgggtgacattcaagcgaaaccgagactttgttgtcagccgaaagatacgccgcgatgtgaatcagtcccgtgcatacgtgaacaagggacgcgggatttatcgggtaaaacgacggctttgcgggagaattcacattgtccaatgatacgacagctccgccgaacagtgaggacgacataacgccgccgcatatcatttcgatgaaccttgcaatgtcgcattcctttacgtttctcgtgggtgagagcagctcgtcaaacaaaagcggagccttggagtaacagctgagagcctcgggcgttaccttgacgttctcttcaccatccgacgcttcgattgacatggcaagctcgtagataagtctgccggtttcggtgcggtaaagctcggtgtcgggcgacatgaagctgataaagtcggtgattttctcgccgagaatacacagcgtcatgggagaagagtttattataatcttttcgagaaagacaaaagcattgccgtatttcagcagtcgtatcacttcaaaaggacacggcaggctgtcagcctcgcagaaatgatagaacagctttcggtcacctaccttcatcgagcggatgatcagctcaagcaagttctccggagagccggctttcacgtcatacgaaaccacagcgaggtctttgtcgagaatcagtgagtctcctgtggaatagggctttagtaccatagtgcttctcccgtgttatcgtagtcgcctgagtagtcgtcataataatcaccggagttgtcgtcataatagccgccgctgtagtcgtagtctgtttccgtttcggtttccgtctcgggtgtagagaacgatgagccggcgtagggattttctatcttctgctgttctgtctcggcagtgtcttcggtcgtttcctcggttgtgtcgagctttttcacaaggtcgtcgggcagagtgtagcctgtgaagctgatgtgctttactccggcgtcggtgcaggctttgtataccgcgggaatgttgtcgctcggagacacgagaaccgtcacggtgtacagctcaaacataccgaccatggagccgagcttgtgcgttacgctgtcataaaccgtgtcgtatgagcctgagacagagtcaaaatacacgcacaaaaacgcgcctctttccgaaaacaattgcagctgctgaacccctctcgcttcaagtacatagtcggagggcagagctatgccgagcttgtcttcgtcaaattccatcgcggagatgtagttttgtatccatctgtgatagttttcgtcgtcgtgcgcggagaattttaacataaccctgtccgctccgttttcgtaaagctccgaaatgagagcgctgtcgacaaaagcggcgtttgagggggaggaaattccgtcggagggagtgagaagcgcgcatacctccatacccttgttcttcgcggcggctgtgcatgacgaaagcaggtcaaatacggtgttgtccgcactcacttccgacctcgatattttctcaagcgcgggagaggagtaaatcagcgtgccgtcctccctgcatacgggaataatcagcgtgctgtagtacgacgagagcgtgtcgagagcggagagcatatccccgtcgcttgtgtatgcggtgaggtctattcctccggctttcatcgcgtaggccgagcctgtgatttctgtcggagtatcggcaggttcacggctgagctggattcccgcggcttctcccgaggctttcatagcttcctcagccgcgtctattttattttttagatgatttccgagcatcgcggacaaaatcacaatgacaagcgcggcgcatattacaaagaatatacgaaacagcacctttgacatttttccgctgccggatcgtctggggtagtatttcaaatctgttcaccacggcttactttaagctgagtacggggtatttttccatcgcgtccgtgtacgttaccgaaagctccttttccttttccgcgagaatgaggttgtatcttccgcggatgtagtcgtcggcaagcacgttgaagttttccgcgatgaattcggcg

SEQ ID NO: 4610 - DNA, 6155 bp, Unknown
  16S sequences of unknown bacteria
ccctttcgctgccttttagacatctccccgaccttgtcgtgaagaatttttccgtagtcgggggaggtcttagtttttttgttttttgcaatactcaattttataccgtccttataaacccattaacatctgtattcttttttataataacaccgataggccgtttcgtcaataaaattatagcaagaagcgcccgcaaaaacaacattttcgcagacgctttttcgctatttggaattttcttcgttgtaggcttttcgaacggcttttgcaagctgatcggcacatgaagtgggcttcatgccgcaggtgtttcccaaaagcttttgctcgatttgttcaacggtgaatccgtccacaagctttgaaatagctttgagatttccgttacatccgccgataaactcgatgttgctgacaacatcgccgtcaaggtcgaaatcaatttccattgcacaggtaaactgcgttctgtatttatgacgcaaaattacaccccatttgctgtttttgaagtattttactacccttttgattttttgtcaatgaaatatagtgcggatttttttgattgttatgggaaaaatattaaaaaatttaaggactgaatagaatgaataaaatgtcgagaaaaacaaaaataagagttttcagctttgcggttgccgccgttttggcagtcggagggctttgcataagctcctttgcagctgccgaaaaatacagcaccatgctgggaacgacatatgaacgcaatctttccgagctgtccgagcacataagcagcattgaaaaccatctgcaaaaggggcgttattcggttacctcctccggcgcatccgaactttccatgaagctttggagcgaggcgcttgcggcaaagacctgtctttcgggacttcccacaagcgggacggaccttgataacacatataaatttctttctcaggtcggcgaattttccctttctctttcaaaaaagatttcggcgggagaggaaatttcggatgaggaaagaaaaacgcttgaaaaactgctcgggtatgccgccgacataaatgccgagcttgatgaaatgtgtcttgccatgaatgaggacggtaagtgggcggaaaacgttaaaaactcaatttatgaaaccggcaatgataacgataatgtcttggaaagcgggttcaacaacatggaagatcatttgtcggactatcccaccatgctttatgacggtcctttttccgaccatattttacaggctaaggcaaaatatatcgaaggaaaaaatgacgtcacaaaggaagaggcggcggaaaaggcagctaaaatgcttgatgttcctgccgagcaccttatttttgacggcgaggaacagggcgttataccctgctataatttttcatacgacagcagcagcgtttcggtgacaaagcaaggaggatactgctcatatatactcacaaaccgcgatatttccgagtcggtttatcagtatgaagaatgtctcgaaaaagccgaacgttttattgaagggcttaatatcggtgatttttcgccgagctattatgcccttaacgaagggatatgcgttataaattttgcctataccgaaaattcggtcgtttattataccgatcttataaaaataggcattgccacagataccggagacgttgtttcctttaatgctcaaggatttataatgaatcattgcaccagaaatttttcggctccgaaaaacgacatttcggcggcaagaaacaaactatctcccctgctttcggtaaaatccgaaaccgccgcggtcattccccttgacaccatggaagagcggctttgttttgaattcctttgcggcggtgaaaacggcgaggaaatacttgtttatataaacgccgatacccttgaagaagaaaaaattctcattgtgcttaaaaccgacggcggagtgcttacaaaatagaaaataatattgaaaaagatttttattcggtgtataattttcaaaaaaagagaggaaggatttttttgagaattataataatccgtcacggagatccgaattatgaaatagattcattgaccgaaaaaggtttcagagaagccgagcttcttacaaaacgaaccgttaacatgggtattgacgagatttggtgctcccctctcgggcgggcaagggccacggcggaagggacggtaaaagctctcggcatggagcctcatgtcgtttcgtggctgcgggaattcgacggagccgttgccgacgccgaaagcggaatcccgaaatatccgtgggattttaagccgagaattttcggcgaagataagcttatttattccgacgaatggcaaaagtcacccctctatgattcggaggactttcgcaaaaaataccgggaagtatgcgacggtatggacgagctcttggcacttcacggatataaaaagcagggtagaattttccgcaccgacgagggaaataccgacacggtcgcgcttttttgccacttcggtgtggagggatttattctgtcttatcttttcggggtttctccccatgtttttcatcagaattttgttgcgcttcccacatcggtcacgacaatttacaccgaagaacgcgaggaaggttatgtttcctttcgctgctgcggctacggcgacgtttcccatctttatgcagggggcgagcagccgtctttttcggcaagattttgcgaaaaattccactctcacgatcgtcataattaaagagaacttgtatatagaaaaaagcgtatcgcttcaagcgatacgctttttaattactgaatttcttcacgcttttgctgctccggcaaaagatttgtcatacttttaagacttatgccgagcgtcgaggtgttgtgaagaagagccgatgtcgtcggctgaataactcccgtgacgccgagcagtatcagcaggaaattaaatccgacaataaaccgataatttctgtctattcgggacatgagagccgttgaaagctttctcagcgttactatttcgaaaagatcctccgacgaaacggttatgtcggcaatttcccttgcaatggccgcgccggaatttatcgcaacacctgcgtcggcttccgaaagggcgggcgtgtcgttgacgccgtcgccgatcatcattaccgttcttccctctctgtgttcccgtcttataaaatcggctttgtcttcgggcagaacctcggcgtgaaactcgtctacacccacggttttggcaattgcggcagcggttttatggttgtctcccgtcatcataaccacctttttgataccgagggcgtgaagggcgtcaatggcatcctttgcctcggctctcagcgggtcaaaaacgcatacaacggcgcagagaacgcccgaaacggcaagataaagatgagaatactcatcggaaatgctgctgaatttctcggcttctccgtcgggcacggtgcatccttcgtcctcaaagacaaaatgatagcttccgataacgacctttttgccctcgaccgtgctggaaattccgtgagccaccacatattcaacctttgaatggtattcttcgtgattaaggcctctgttcttcgcctcgtcgacaacggcgttggcaagagagtgaggataatgctcttcgagacaggccgcaagacgcagcatctcgttttcctctttgtcggcaaaggtgacgattcgcgccacggtaggctttgcataggtcaatgtgccggttttgtcaaacacgacggtgtcggcctttgccacggcctcaagaaaacggccgcctttaaccgaaatgttatatttatttccttccctcatggccgaaagcacggctatgggcatggaaagcttgagcgcacaggaaaaatccaccataagcaccgaaagcatttttgttatgtttctcgtcagaagatatgtgagcaacgttccgccgagagtgtaaggcacaagtttgtcggcaagccgcgaggccttgtcctcggccgtggacttgagtttttccgattcctctatcattttgacgatacggtcataacgcccgccgccggtcgtcttttctaccgagataacgcactcgccttcctcaacgaccgttccggcataaacatagctgccggaattttttctgacaggcagagattcgccggtcatggatgcctgatttacgagagcctcgccctcataaaccttgccgtcaaggggtatcatgtttccggttctgaccacgatcttgtcgccggccgaaatgtccccgacgggaacgagaatttcgccttcctccgccttgagccaaaccttgtcgacattaagcgacatggcgcccgcaagatcggaaaccgactttttgtgggtccagtcctccagcatttcgccgaggccgagcataaacataaccgatgcggcggtggagaaatcgccccttaaaatcgaaaccgaaaccgccgtcgcgtcaagcaccgacaccgacagctttcccgcaagcagggattttactcccgcctttatgtatttcaccgagcggaaaaccgcaatggcagaacgaataacagacggcaaaaacagctttgaagcgaaacgtcttataaccgaaaaaacaagtctgtcctcaaattcgcggttgagagcgcgggaggtgttgaccggaacaagctccgcgttttcggccttttcaaaggaaaatgccgagagcgccgcaataacggcgctgcgcttacagctgtaaaaaacaaccgcgtcggcggtgcggtcaaaaaccttaacgtcggctacgccgcaaacgcccctcaaataatactctgccaaatcggcctgagaaagggacattcgggaaatacaaaaatgaattctcattctgccctttgattcatgcagaatctgacacttcataaaaaaacctccgaaaaaagagagccgaaaaatgcggctctctcaaagaaaattattcctcggtctccgcttcggccgcctcgcagcatccgcaggagctgtcctcgattacttccttcttttcggcgcatttttcattgatgtcctttgcatcggcaaaaatgtcctcggcattctcttttatggtcgtaaccttggtcataatctcttccttggctctgagcgccgcggcagtggagtaggtgtaaacctttctggcctcacggctgcttaaaatcttcagtccagcagttccgaacagaacgcctccggcaaaaagtccgagttttccgaaatcaaatttcattttaattacctccgtctgaataatgggaaaagagataatcttttccgataaaaaaattttatcaccggaagaacgatttgtcaataaaagtcgaaaaaaatttacattttcacatgtgagcagctgtgaaaacgttagtttttaaggctttgcagcggtgcgggaagccgtcctccccttgaaataaactttgcgggagaggcggtgttgaccgccattacaggtccgcttccgagaagcccgccgaaggaaagctcatccccgacgcttttgccgattgcgggaataaggcggacggcggtggtcttggaattgaccatgccgattgcggcttcatcggcgattatgcccgaaatcacctcggttggagtgtctccgggaatgactatcatgtcaagtcccaccgagcatacagaggtcatggcctcaagcttttcgatggtcaggtggccgtcgcgggaggcgtcaatcataccggcgtcctcggtgacgggaataaatgctcccgaaagcccgcccacatgagacgaggccattaccccgccctttttcacggcgtcgttaagcatggcgagggtggctgtggttccgcaggcaccgcaatgctcaagacccatttcttcaagaatatgagcaaccgaatcgcccacctcgggagtcggagcaagggacaaatcgacaattccgaagggtacgcaaagccgctttgaggcttccattgccacaagttgacccattctggttattttgaacgcagtgcgctttataatgtcggcaagctgatccaccgaacagtctcccgctttttcaagggcgcattttacgactccggggcccgaaacgccgacatttatcacacagtcgggctctcccacaccgtgaaacgcacctgccataaaaggattgtc

SEQ ID NO: 4611 - DNA, 32759 bp, Unknown
  16S sequences of unknown bacteria
aaaaaagcctgtattcatgcgggttttcgccgtttcgagcgtcattcccactcgatcgtccccacgggcttggggctgagatcgtacagcacgcggcacacgccggggacctcgctgagcacgcggtcggtcacgcgcttgaggagcgcccagggcagctcgggcacggtggcgatcatggcgtcgacggtgttgaccgcgcggatgatcaccggccagtcgaatacgcgcgcgccatcgcgcacgccggtggagcgcatgtcgggcacgatggtgaagaactgccacacctgggaggtcaggcccgcgcggtcaaattcctcgcgcaggatggcgtcggactcgcgcagggcggcgaggcggtcgcgggtgatggcgcccaggcagcgcacgcccaggccggggccggggaagggctggcggtacaccatgctgtccggcaggcccagggccgcgccgacctgacgcacctcgtccttgaagagcaggcgcagcggctcgaccagatcgaatttgaggtcgtcgggcaggccgcccacgttgtgatgcgccttcacgccgtggctttccacgatgtcggggtaaatggtgccctgggccaggaactcgatgccctccagcttgcgggcctcctcctcgaacacgcggatgaactccgcgccgatgatcttgcgcttctgctccgggtcgctcacgccctccaggcgggtgaggaagcggtccaccgcgtccacgtagatcaggttggcgcccagctggttgcggaacacctccaccacctgctcgctctctcccttgcgcatcaggccgtggttgacgtgcacgcacaccagctgccggccgatggcgcggatgagcagcgccgccaccaccgagctgtccaccccgccgctgagggccaggagcacctttttgtcgcccacctgggcgcgcagggccgccacctgttcgtcgataaaggcctgcgccagctccggcgtgctgatgcgcgccatgctgtcgggccgcttgttggtttccatgagaactctctccttccgccgattgatcctatggcatatcatagcatacagggcgcgaatgtgccagtgcctgcgcgggtttttgtccaaaaaaagcgcggaggcaggcgaaatctgccgttgccctcgcgccgggggtgtgttacaatagctgcgtttccatagcgccgcgggcgcagcgaggaggatgtttccatgccgaatttttccctgaaggatcaggtggttttcgaggcggcgcgccagtttgccacgccgtttcatctctatagcgagcgcggcattcgccagaccgcgcgcgcgctcaaggacgcctttggcgagatcgaggatttccgcgagtactttgcggtcaaggccctgcccacccccgccgttttgcgcatcctcaaggaggagggctgcggggtggactgcgccagcgccaccgagctgatgctggccgacgcctgcggatttcagggcggggacatcatgttcagcgccaacgacgtgaccggggacgagttcgccctcgcccggcggctgggcgcgtacatcaacctggacgacatcacccatgtggacacgctggcgcaaaacggcggcgtgccggaaacggtgtgcctgcgcttcaatcccggcggcaccttccgcatcggcaacgccatcatgggcgaccccggcgacgccaagtacggcatgacgcgtccgcagctcactgaggcgcttttgcgcctcagggacctgggggccgtgcgcttcggcctgcacgccttcctcagcagcaataccaccgaccccgcctattatcccgccctggcaaggctcctgtttcagaccggccgcgagctgatggacgagagcggcatgccgctggcctttgtcaacctgtcgggcggcatcggcattccttaccggcccgatcagcccgaaaccgatatccgcgccgtgggcgagggcgtggcgcgcgagtaccgccgcgccttcaccgaaaacggcatccgcggcgtggccatcaagaccgagctgggccgctacatgaccggccccaacggctggctggtgacgcatatcatcaacgaaaagcgcatccataagcactacctgggcctggacgccagcgcctgcgacctgatgcgccccgccatgtacggcgcttatcaccacatcaccattcccggcaaggagtacctgccgcatgaccagctggtggatgtgacggggagcctgtgcgaaaacaacgacaaattcgccgtggaccgcatgctgcccaaaaccgagatcggcgacctgctggtgatccacgacaccggcgcgcacggcctgagcatgggctacaactacaacggcaagctgcgctgcaaggaggtcctctggtgcgaggacggctccttccggatgatccgccgggccgaaaccccgcgcgactacttcgccacgctggatatggacccggtctggccggtgctggaggcgcggtggctgaaataaataaaaaaacggcaggcggccgcccggaaaaggcggccgcctgctttgtttatgcttcgtttgatggaaaggcgaaggtaaagacggtcccccggccctcttcgctggcaaccgagatggtcaccccgtgccgccgggcgatctccgccgcgatggccaggcccaggcccgcgccctcgtgcgaggggtcgcgtgtgtggtggaagcgctcgaagatcagcggcacctccgcggcgggaatgccggggccctcgtcggccacggagacggagcgctgcgcctcgtccagccacaggcgaacgccccgccccggcggcgtgaatttcacggcgttgtccacggcgatcatgagcatctggcgcaggcgggaatagtcgcccatgacctggggatgggcggacggctcctcgcaggcaaaggtcaggcccttttgggtgcacagggcgcgggcgctcatggccacgtcgctaagcagctcgctcaggtccacgggcgagaggtccagcgcaaagtcgtcgctctgcaggcgcgagagctccagaaggtcgcgaatgaggtgctggagccagcgcgtctccccgatcatctgggcgtaataggcgctcacggcctccgggccggtcaccacgccgtcgcgcagggcctccagcgacccgcggatcaccgtgaccggggttttcagctcgtggctgatgccggaaaacagccgctgctgcgccaggcggtgctgctcgtcgcggcggcgcgcctcctccaggcgctgggccagcacgtccatcgagcgcgccagcgagcccacctcgtcgcgccgccgggcgtgcaggggctgcaccggatggccggaggccagcgccacggcgaccttttccacccggacgatgggccgcgtgaacagccgcgaaaacaccagcgccagcaccgccgaaagcacgaaggcgatcagcccgctggagatgaggatggccgcgctgggcacctgctgaaagcccagctcgcgcagcgtggcgtccagaagcaccacgcccagcacgcggctttgcgcgtccatcacgggcatggaggcgcacaggcgggtttcgccgtccatctcggcatggatgatgggcgttttgcccatgaagcccagggcgatgctctgctccagatagcccgccagcagggggtgctccagtacctgcaccacgccgtcaaagtagccggtcacgttgtggtgcgaatccaccaggtagacgttgcagcgggtgagctgctcggtcagggcgaggtaggggggcaggttttcctcgctgacgatgaagcgggtttcgtccagcgaggcgtcataggcggagggcgccaccagctccgagaggttctgggcgatggcgaaggcgtcgcgctgcatggcctggctgtgatgcgtgatggactggcgcaccatcagcgcgttgtagatcaccgcggtgaggacggtaaaggccgccagcagcagcgaaaacagcagcatcagccgcatggtgagcgagcgcttcatggcagccgcctttcaaacttgtagcccgtgccccagacggtggcgatggagaagaagtcgtgcgggtaggcgtccagcttctgcctaaggcgcttgatgtgcgaatccaccgcgcggtagttgcccgcgtgctccacgccccacaccagcgtgagcaggttgtcgcgcgtgaacacccggcccggcgcggaggccagggtgtagagcagctcggtttcgcggcgggtcaggtccagcctgcgcccgtccagcgtcacgctcagcgacggcaggtggatcgaaaggctccccaccaccagcgtctcctggcccgtgggcgcgggcatgcgccgcagcaccgcccggatgcgcgccatcacctcgccgggggaaaagggcttgacgatgtagtcgtccgcgccgatgtccaggcccagaatgcggtctgcgtcctcgtcgcgggcggtgatcatcagaatcggcacgcccgatacccgccggatgcgccggcacacctccagcccgtcgatgcccggcagcaggatgtccaaaaggatcacggacgggtccgccgcgtcaaagagggacagcgcctcctcgcccgagcgcgcgcacaaaagcggccagccctccgcggcgatatagcgcgagaggatctccacgatctgctcgttgtcatccacgatcaaaatggggttcacttgcgtccctccccgcagtttatcagggacattgtagaaggttgaaaggagattgtcaaattttcgacgaaaatttcaaaaagccatacttttgccacaatcggcatgtatgcttatttttacaaccgggaggaagcagacgatgaaacggatgtgcacggcggcttttctggcgctttggctggcccttacgggcggcgcggcggcgcaggaggcgtcctatgccgacgggatctaccgcggcttttactacgacggcggcattgagcagattgccatccagttcgagctgcaggacggcgtgtttcagtccgtggtgtaccgcggggtgaagtacaaggacggcgactacatgagcgacgacgccagcgacgcccagaaggccgcgctgcgccagtaccgcgagctggccgcctatctggtgggcaagggcgtggacgccatcgacgacctctacgccccctacggcatcgtggaggacatcgacgcggtcaccaccgccacgatgcagtcctccaagctgatctcggccctgtgggacggcctcaaccgccgcccgttcaagctgctgagcaccgccaagctgcccgcggccggcgaattcgccgacggggtgtaccgcggctcctacatggaggacggcgaggaggaagtggcggtggagttcacgctggagaacaacgtcttttccgacgtgcgctaccgcgcgctgagctatcacggcgtggactatctcagccccgacgccccggaggacgcaaggcgggtggccggacagttcgaggcgctgcttgcgcatcttcaggggcagcccgtggacgccgtcaacgacctctaccagcccggcgacatcgcgccggacgtcgacggcttcagcggcgccaccctgcgcgcgcccaaggtgatctccgccatctgggacgcgctcaaccgccacgcctggcatgtggaatgacgcgctttgccgcccttcttgggcggtgaaacataaaaaaaccatctgcaaaggagaccatcaaccatgaagaaactgctgaccgccgcgctggccgcgctgatggcgctgtgcctgatccttcccgccgtggccgagggtgaagtgaccatcggacaggccctctacgccgcgcacggcaccaagtgcttcgccgtgctgaccgtggccatgcaggacggcgtgatcgccgacgcctacatcgacgagttccagttcatgaccgcgggcgaggccgtgggcgtgcccaacagcgacgccgacttcggccagagctatcccgagggcaaggtgctggcctccaagcgcgaaaacgccgaaatgtacagcgcgaacatggccgccgccggctccaccgtggcgctggacgtgaactatgacgccattcaggactacgtgaccggcaagaccatcgaggagctggaagccgccgtggacggcaagaccgccgaggaaatggtggacgcggtcgccggctgcacgctggtggatacgctgggctatgtgaacggcctgatcgaagccgccaaggccgcctccaagtaagaggcgcgacgcacggggccgccgggggagcattcccccggcggccttagactgttgaaaaaaccgtgattttggagagcgccgcgtttcttgcgcccttcgggcgctcgcaacgctcacgaaatgtgcagcggcataagactttggggcgccgccccaaaccccggcaggggcgaagggaagcgcgtgccctgtgggcacttgggccgaaggcccaaagcgacccgaagcggggcagcgaaaccatgcgcgcgaccgtcagggagtgcgcgtgattgagcaaccgggaaggccctgcaccccgcactttgtcggcggcctctttgcacttgcaagaagccgctttttttgctatgctgggtgcatctgcgccggggcacgtccccggcggaaccgaaggaggcggcggcggtggagcggcccatgcgcgagatgctcgcgggcgtggcggacaggctgtccttgcatatgccgggagcgcaggggcgcgggccgttcgggccgctggacccctaccggctggaaaccaccgagctcggcgtgaccgacgacctctacgccccctgcggggcgatcgcgcgggcggaggcgctggcggcgcgctgcgcgagcgcggcgcacacgctgatgctcaccggcgggtccaccgcgggggtgcaggccatgctgctctacgccgcgggcggcggcggagcggtggttttgccgcggaacgcgcacctttccgcgctgcatctgtgcgcggtggcggggctggacgtggtgtttgcccggccgtcgttcacggcgtcgggcctgtgttacaccccggacgagagctatctggaggcgctggaacgccgcccggacgcgcgggcgctgctggtggtcaggccggattactacggcgcgctgcactggccggcgcgcgcggcggcgcgggcgcgggcgctgggcatccccgtgctgtgcgacgaggcgcacggcgcgcatctcaactgggacgcggagacgcccacggcgggcgcgctgggggcggatgtgtgggtgcagtcggcgcacaagacgctgctcgcgctcaacggcggggcatggctgcatgcggggccgggcatggacgcggcgcgccttcgggcgatgctgcgcgcggtgcagagtagcagcccgtcgtttgtgacgctgcttgcgctggacgacgcgcgcgcctggatggagcaaaacggcgcggaggccgtcgcgcggctcaaggccgcggcggcgcggtttcacgcgcgggcggcggcgctgggctacgccgatgggcaggacgagccgggctgggcctacgaccgcacgcgcgtggtgctccgggccccgcagggcgggtacgcgctttcggaggcgctggccgcgcggggcgtggacgtggagatgagcgacgccgatcgggtggtgtgcatcctctcgctccttgatgggccggagcggcttgagcggctggcgcgggtgctgcgggaggtcgcggcggacggacggcgcaaagggccggacgggtcctgcgcggatgaaaacagcggtggagcgggcatgcccggcgcggtgcgtgcggacggcggcggtttggacgcggaccacgggacgcagggcgcggaacatggaagcgcggacgggaccggttcggacggcctgcgggcattcgcggcggacggcgggccggactggttgcccccgcctgagccgcccgagcgcgtcgtgccgcttcgggaggcgtttttcgcgccgtcggaggcggtgccgctcgaccgggcggcgggccgcgtgagcgccgcagcggccgggccgtacccgccgggcgcggcgctggtcacccccggcgagcgggtgacggaggagctggcggcgtatctggccgcgctgggcccgcgccgcacgttcggcctggggccgggaggcacgctggcgtgcctgcgctgacggcgcggggcgcgaagccgcggccatcctgcgctgacgggggtcccgcgaagctgcggcattcccgcgctggccgcgctgggcccgcgccatacttcggcctggggccgggaggtacgctggcgtgcctgcgctgacgggcgcggggcgtgaagccgcggccatcctgcgctgacggaggcggcccgcgaagctgcggcatccccgcgctggccgtgctgggcccgcgccgcacgttcggcctggggccgggaggtacgctggcgtgcctgcgctgacgggggcggcccgcgaagccgcggcattcccgcgctgacgggggcggcccgcgaagccgcggcattcccgcgctgacgggggacgcgcgaaaccgtcaatatttcccatccacccgcgcgcaaaggcgcggggcaaacggttgactgcatacggtaaaggagatcgctatggacattttcccctatgacgcggtggtgtttgatctggacggcacgctctttgacgcggaggagggcatcgtttcctcggtgcggagggcgatggacgagatggggctggaggtgccggcggacgcggacctgcgcgaggtggtgggcccgccgctggcggattccttccgcgacctgctgggcgtgcccgagacgcgcgttcaggaggccgtggaccgctaccgccgcgatttcagcgcgcggggcatgtacctctacagcgtgtaccccaacatccgcagcatcctgcgcatgctgcacgaggccggggtgcacgtggggctggccacctccaagccgcttcggctggcgagggacatcctgtcctacttcgcgctggacggcgattttgaccgcatcgtgggcgaggaggacgcggcggccaagctgggcaaggccgagctgatccgccgggccctgccggaccgctaccgccgcgccgccatggtgggcgaccgcaagttcgatatggccggcgcgctggccaacggcatcgagggcatcggcgcgggctacggctgcggcaccgaggaggagctcaccgtggcgggcgcgtcggtcgtggtgccggataccgagggcctgcgcgcggtgctctgccccggcggggagatcccgcgcgggttcttcctcacggtggaaggccccgacggcagcggcaagaccacccagaccgagcttctggaaaagcgcctgcgccagttcggcttcagcgtgctgcgcacgcgcgagccgggcggctgcgccatcagcgaggacatccgccgtatcatcctcgacacggccaacaccgacatgtgccccgcctgcgaggcgctgctctacgccgccgcgcgcgcccagcacgtcagtcaggtcatccgcccggcggtggagcgggggatgctggtgctgtgcgaccggttcgtggacagctccgtggcctaccagggcggcggacgcgggctgggtgtggaaaccgtgcagcagatcaacgaccccgccgtggacggcatgacccccgacgccacgctctatctggccatcgaccaccgggaggcgctgcgccgcaggctgagcgcctccgagcccgaccggctggagctggaggcgggtgagttccacgagcgggtgcagaaggcctacgagcgccttgtgcgcgacaaccgccgccgctttgtggtggtggacgcggcgcgcggcgtggacgaggtggccagggacgcgctggatgcggtgctggaacgcctgctgcccgaccgccgggcctgaagcgggaggaaaccgggatggagagaatcgtggtgggcatgtccggcggggtggacagctccgtggcggcgctgctgctcaagcggcagggctacgacgtggtgggcgtgttcatgaaaaactgggacgagaaggacgaaaacggcacctgcaccgccgccgacgactggaacgatgtgcagagcgtatgcgataccatcggcatcccctgctatgccgtcaactttgaaaaggaatattacgaccgggtcttctcctattttctggacgagtaccggcgcggccgcacgcccaaccccgacgtgctgtgcaaccgcgagatcaagttccgcgcgtttctggactatgcgctcaagctgggcgcaagccgcatggctaccgggcacttcgtgcaatcggaggtgcggggcgggcgtcctgtgctcctcaagggcgcggacgcagccaaggatcagagctacttcctttatatgctcaaggagcggcagctcgcgcgcgcgctgtttcccgtaggcggcatgaccaaggcgcaggtgcgcgccgtcgcggaggaaaacggcctgtccaccagcaaaaagaaggattcgacgggcgtgtgcttcatcggcgagcgcaacttccgccgcttcctgcagggctttttgcccatgcagccgggccagatgcgcacccccgacggccgggtggtaggtgaacacatcggcctggcctactacacgctgggccagcggcgcggcctgggcatcggcggcgggggcgacgggcggcgctggttcgtggtggacaaggaccttgagcacaacgtgcttgtggtggagcagggcgaggacagcccgcgcctgtacagccggttcgtgcgcgcctccggggcgacgtggatcgccggggacccgcccgcgccggacggcacgcccatgcgcctgacggcgcgcttccgctaccggcaggacgatcaggcggtgacggtcgtggcgcggggcgaaagcctgctcatcgaggcggacgagctccagcgcgcggtcacgcccgggcagagcgtggtcctctacgacggggacgtgtgcctgggcggcgcggtggccgacgcggcggggatgacggcgaaggggtgagggcgcggtgggcggcgcggacatggtgcatgcagggggcttgagttccctgcttacaatgtgataggctttcccaaaagcagagaaaggacccctgaaaatgaaacgtatcgcattgctgatgattcctcttctgctgtgcttcgccgctggtgcggtggcggagaatatacagccggcttctaatgaaatgtatgaatgcggagactatatctacattctgatggaagacggcacagccgcgattataaactatatcggcgcggctttagaactggaggtgcccggagagatagagggccatcccgtggcctacatcgccgacggcgctttctatcagtgcgatagcctgaccagcatcacccttcccgacggcgtgacctctatcggcgagtctgcattcagttggtgcggcagcctggccagcgtcacccttcccgacagcgtggctttcatcggtgattctgcattttattcctgcggcagcctgaccggcatcaccctccccgacagcgtcgtttccatgggcgggaatccttttgcggcttgcggcaaactgcaaaccattgcggtttcccctgatcatcccaagctggccgtggcagacaacgtgttgtttgacaaaacggaaaaaaagctgatttgctatccggcaggactcgatgccgctaattatgaaatcccgcagggaatcaccgcggttggtgattctgcgttcagcttctgccacagcctgaccagcgtcaccctccccgacggcgtgactaccatcggcgatgccgctttcagcgcctgccacagcctgaccagcgtcacccttcccgacagcgtgactaccatcggtgattttgcattcagttcttgcgacagcctgaccggtatcacccttcccgacggggtgacctccatcggcaattccgcgttctattcctgcggcagcctgaccagcatcacccttcccgacggcgtgacttccatcggcaattctgcattcaattggtgcgacagcctgaccggtatcacccttcccgacggcgtgacttccatcggcaattctgctttccgctcctgcttcagcctgaccgatatcacccttcccgacagcgtgacttctatcggcaattttgcattcgattcctgcggcagcctgaccagcgctgtcatccccgacggcgtgacctccatcggtaaagacgcttttgatgactgtgccgataacctggcgctgaccgtaggccagaattcctatgcgatgcagtacgcgatagacaacgacattcactacatctgtccggacaccaataactagctgtacgaataacgctgcggacggcggaacgctgcagggctgcaagcgacctcggagaagggcggccagcgcgccccatctcccgccgccctgcaccatctgaccaaaaattgtccgcttcttcatagaaaaacaatgcaaatacatccaattttcgcaaagccgcttgcgtgataagcacacagcggctataatattcaacaacattcgggatggttccggatgtgacgaagtacagtagggaggtaaccaagatgaaaaagattctctccgtgctcctgacgctggttctggcgctgggcctggccctgcccgccgtggctgaggacgcgatcaagatcggcgtgatcggcccgctgaccggccccgccgccatttacggcaccgccgtggtcaacgcggccaagatcgccgccgacgaggtcaacgcgctgggcggcctgcagatcgaaatcgacgcgcaggacgacgagcatgaccccgaaaaggccatcaacgcctacaacaccgtgctggacaacggcgccaagctgatcgtgggcaccgtgacctccggcccctgcgccgccgtggccgccaaggcatatgaggagcgcatcttcatgctgacgccctccgcctcctccaccgacgttatcgccgacaaggacaacgtctatcaggtctgcttcaccgaccccgcccagggcgccgcttccgcccagtacatctccgagcatggcctggccaccaaggtcgccgtgatctacaacaacggcgacgtgtactccaccggcatctatcagaccttcgaggccaaggccgccgagctgggcctggagatcgtgaaggtcaccaccttcaccgacgagaccaccgacttctccgtgcaggtgaccgagaccaagaacgccggcgccgagctggtgttcctgcccatctactacacccccgcttccatgatccttacccaggccgcttcgatggattattcgcccatcttcttcggcgtggacggcatggacggcatcctcaccatggaaggctttgacaccagcctggccgagggcgtgctgctgctgacccccttcagcgccgacgccaaggacgaaaagaccgtcaactttgtcaacaagtatgtcgagctctacggcgacacccccaaccagttcgccgccgacgcctatgacgcggtctacgccgtctacgaggcgatggtcgccggcggcatcaccgccgacaccacccccgaagaagcctgcgagatcatgatcgagcagatgcagaagctcaccatcgagggcctcaccggcaccatgacctggtccgccacgggcgaagtgagcaagacccccaccgccgtcaagatcgaaaacggcgtgtacgtgggcatggaataacaaccgcccggcgtcccctcccggcccccgcggccgggaggggcctacaagcgaacacagcgaaggtaaccaacggtagtctgacgggaaggcacgcccgactaccgttgattaccttatcgcgtttcaaacgagacaaaggatgtgggagagcatgacacaattcctgtcctacctgtgcaacggcatcagcctgggcagcgtgtacgccatcatcgccctgggctataccatggtctacggcatcgccaaaatgctcaacttcgcacacggcgacgtcatcatgatcggcgcctacatcgccttctgcgccatgcagtactggggcttcccgccgattctgtcggtgctggcggccatggtggtgtgcacggtgctgggcatggtgatcgagcgcaccgcctacaagccgcttaggcaggcctcgtccctggcggtgctgattacggccatcggcatgagctacctgctgcagaacatcgctctgctggtgtggggcgccaatcccaagagcttcccctcggtggtggggctgggctcgctgtctctgctgggcgggcagatgatcatctccggtgaggccatcgtgaccatcgccgcctgcgtggtcatcatgatcgccctgaccctcttcaccggcaagaccaagatgggcaaggccatgcgcgtggtgtccgaggacaagggcgcggccgagctcatgggcattaacgtcaaccttaccatcaccgtgaccttcgccatcggctcggccctggcggccatcgcgggcgtgctgctctgctcggcctatccgacgctccagcccaccaccggctccatgccgggcatcaaggccttcacggcggcggtgttcggcggcatcgggtccattcccggcgccatgctgggcggcattctgctgggcgtgatcgaaatcctgggcaaggcctacgtatccacggagctgggcgacgcgttcgtgttcgcggtgctgatcgtggtgctgctggtcaagcccgccggcctgctgggcaagaccgtgcatgagaaagtgtgaggtggcggccatgagcatgagcatgagcatgagaaaaaaacgggccatcggcagcctggtgacctacctgatggtgatcgccgcctacctggtgtgccagtacctgctggccaccggcggcatgacccgctcgctgcgcggccagctggtgcccatctgcgtatgggtggtgatggcggtttcgctcaacctcgtggtgggcgtatcgggcgaactgagcctgggccacgcggggttcatgagcgtgggcgcgttttccggcatcgtggcctcgggctggatgctgggcgccttccagcttgaaaacgaggtcgtgcggctgctgctgtccatgatcgtgggcggcgtgtgcgccggcgtcgcgggcattctgatcggcatcccggtgctgaggctgcgcggcgactacctggccatcgtaacgctggccttcggcgagatcatccgaaacgtcatcaactgcctgtatatctccatcgacgcggggcggctgcactttgccttcaacgacagcaacatccccggcgagctcctcgtcagcggccccaagggcggcgtgggcatcgacaccatcgccaccttcgggatgggcttcgcgctgatcctctttaccctcttcgtggtgcagaacctcgtcaacagccgctccggccgcgccatcatggccacccgtgacagccgcatcgccgccgagtccgtgggcatcaacatcaccaagtacaagatgatggccttcgtgaccagcgccgtgctcgccggcatggccggctcgctctacggcctgaacttctccaccgtggccgccagcaagttcaagttcgacacctccattctcgtgctggtgttcgtggtgctgggtggcatcggctccatccgcggctccatcatcgccgcgacgctgcttaccattctgcccgaggtgctgcgcgccttcagcgactaccgcatgctggtgtacgcggtggtgctgattctggtgatgctggccaccaacagcccgtttttgagcgtgcggctccagcgcctcaaggcgcttgtgcgccgtgaaaagaccaaccccggaaaggagggcgaggcggcatgacgcagcagcacaagcggcaatccgaaaccaagatggtgcccgtccccagccattccatcgtgcccgagcgcgacgtggacaagcgccccgtgctggaaacgcgccacctgggcgtggagttcggcggcctgaaagccgtggaggactttaacctgaccatcggccgcaccgagatcgcgggtcttatcggccccaacggcgcgggcaagaccaccgtattcaacctgctgaccaaggtgtaccagccgaccaccggcgtggtcatcctcgacggcaaggacaccgccggcatgaacgccgtgcaggccaacaagctgggcatcgcccgcacgttccagaatatccgcctcttcggcaacatgacggtggaggaaaacgtgcgcatcgggctgcacaaccagatcaagtacggcatgttctccggcatcttccgcctgcccgcctactggaagcaggagaagaagcagcacgagaaggcgctggagctgctttccatcttcgacatgcagggcatggcccagtaccgcgccgggtcgctgccctacggcgcgcagcggcggctggaaatcgtgcgcgcgctggccacgcatcccaagctccttttgctggacgaacccgccgccggcatgaacccgcacgaaaccgaggaactgatggagaacatcatcaagatccgcgaccagttccagattgccgtgatgctcatcgagcacgacatgaacctggtcatgggcatctgcgagggcatctgcgtgctcaactacgggcgcatcatcgccaagggcaccgccagcgagatccagcagaaccccaccgtcatcgaggcctatctgggcaagcggaaggaggcgcaggcatgagccttctcaaggttgacaacattcacgtctattacggcgcgattcacgccatcaagggcatctccttcgaggtcaacgagggcgagatcgtcaccctcatcggcgccaacggcgcgggcaagtccaccacgctcaacaccatcgcgggcctgctcaagccccgcagcggctccatcaccttcgagggccgaaacctgctgggcataaaggcccacaagctggtgtcccagggcatggcgctgtgcccggaggggcggcgcatcttccagctgatgaccgtgcgcgaaaacctcgaaatgggcggctactcccgcccgccgcaggagatcgagggctcgctggaggacgtgttcgcccgcttcccgcgcctcaaggagcgcgaaaagcagatcgcgggcactttgagcggcggcgagcagcagatgctcgccatgggacgcgccctgatgagcaagccaaagctgctcatgctggacgagccgtcgatgggtctggcgcccattctggtggagcagatcttcgacatcatcaaggagctgcacgaggcgggcactaccatccttctggtggagcagaacgcgcagatggccctgtccatcgccgaccgcgcctacgtgctgggcacgggctgcatcaccatgagcggcaacgccgcggaggtgctggccgacgacggcgtgcgcaaggcgtacctcggcggctgacaaacgcaaaaaaaaggcccccttctctgccatccggcaggggagggggacgttttttttcatcagcttccggaggcggcgcgttctcccagccgcttgtgcacctgctcacgcaggagcgtgtagcacaccgaggtgagcgggatgaacagcagcatgcccagaatgcccatcaggccttcgcccagcagcaccgcgaagagcacccagatggacggcaggccgatggcgttgcccatgacgtgggggtagatgaggttgccctcgatctgctgcaggaacaggaacagcgccacgaaccccagcgcctgcagggggttgttgaccagaatgagaatcgcgcccacgatgcagcccatccacgcgccgatgaccgggatcagcgccgtcaccgcgatgaacacgctgatgagcaacacatagggcatgcccagcagcgtcatggtcacaaagaacatgccgcccaggatgcacgcctccaggcactggcccgtgatgaaactggaaaacgtgcgctggctgaggtccgccaccgacagcgccttttccacccagcggggcttgaggtaggcgcgcatgaggtttttcacctgggagcgcaggcgctccttggaggagaggaagtagatggtgaacatcaccgtgaaaaagaagctcaatacgttctgatacaccgtgccgatgaccgtggtggaaaacgccgcgcccttgagcaggaggttgaccatgtcggcgatcttggcgtccacgtcgctgacggaggggacggtgaagctggcgctgagcacctgcgaaacgctgaagccgtagggctcgatcagctcatccagccgcgcgagcgccgcgggaatggcccggatgaccgacacaagggtgttgatgagctccggcaccacgatggacatgatgacgtacaccacccccaccaccagcgccagcaccagcaccatcgccaccggccgccgcgcccggcgcaggcggggcgaccggtccatgaaaaacagaacccgccgctccagaaagcgcatgggcacgttgagcacgaaggccaaaacgccgcccaggaaaaagggcatcaggatgctccacagggtcagcatcagccccgtgagcgagctgccgcgctcaaaaagaaaataaatgccgatgatgagcgtggccagcagcaggatggccaggaatttacggcgctccaatcgcatcgcctcccgtgtgcgtctttcccttatcataccacatccgggcgggcggaggaagggcgttttttgcatgcgggagagattggttacgctttgttcatctttcccggatggtttgttcatttttgcctgctatgatggaggtagaaagggggcggtgggcatgtcgaagcggcgcagggtggcggcggcgctggggattgtgctgggcgtctatgtgctgctggcggcgcttccctacgccttcccgcccgcggcggagcgggcgcaggcggcgtttgtgcccgtggaggacggcgcggcgggcgaccgggccacgatcctgaccacgggcgaggaggcgctcgccgcccggctcaacctgatcgccaacgcgcagacctcgctcatcgtgggcagctatctctacgccgacgacgagagcggctacaccgtggccgcggccctgctggacgcggcggaccggggcgtgaaggtgcgcatcgtggtggacgggctggtgggacggctgaatttcctcggcggcgacctgggctatgcgctgggcacgcatgagaacatcgagatccgcctctacaaccccgtgaacctgctggccccctgggggctgagcgcgcgcttccatgaaaagtacgtcatcgcggacggaaagaccttcgtgctgggcgggcgcaacatttccgacgagttcctcacccctgaggagcaccccgcctacaactatgatctggatgtgctcatgtggcgcgaaacgcccgcgcagggcagcgccgcgagcctgttgacggcctatttcgaccggctgtgggacgaggaatgcgccccggcctacgagcgggccccggcgtggcggaaggcgggcgccgcacgcacgcaggacgagctgcgcagccgctgggaggcaatggagacggaatacgcccgggccatcgccccggcggactgggaggcgctgaccgtgccggtggagggctgtgccctgctgaccaacccgatcaaccccggcgtgaaggagccggcgctgtggacctcgctggtggcgctgatgaggagcgcggaggagcgcgtgtggattcagacgccctatgtggtgctggacggcgccatgcgcgacggcctgcgggcggcggcggagcaggcgccggagcaggcgccggagatggtgctgctgaccaattcgcgcgccgggggcaacaacatcgtggcctcggcggacgcggtgtttcaccgggggatggcgctttcgatgccgcttgcctattatgagctgcaggccccgcgcagcatgcacaccaaggccatgctggtggacggagacatcagcgtgttcggttcgttcaactttgacatgcgcagcgcctactcggacaccgaggtgatgctggccgtgaaaagcgagccgctcaacgaccggatggaggcgtacatgctggacatgcgcgccctggccctgcccgtggaggcggacggcggctatggcgagggcgaagcggaggcgctggacacgccgcttctgaaaaatctgctgattgtgacggcgtcgccgttgatttcgctggtgcggttcctggtatgaggcgcgaggcgggcggaaacgccggacgagagcgccccggtgcgggggcgggaagaggcgcggccgggagccgccggaaaggagaaaaacatgaggcaactttgcggatgcatgggctggggactcagggtggaccgggagggcaacctgcacgatacgttccccgcgccgggggagccggtctgctggccgcgcacgccgtggcatgtgaaggtccgccgccccagaaagcgcctggcgcgcgggaggcggctgctcaggggcactttgggcgcgggaaagcggctgatccaggcctgccgcccgatgcgcgtttcgcgagcggcgtgcgcgccggggctgggccgggcgtgagcggcgtgtgcctccgggaagggcgcagaggtgcggcgcgcggccagacggcgcggcacgcgtgagcgccgggcacaagccggaaacggtttggaaaggagcggcctgacggcgcggcgcgcgtgagcgccgggcacaagccggaaacggtttggaaaggagcggcctgacggcgcggcgcggaaagggtgcgcggaccggcaggtcatggacaagtgaaaaaaaagccccggagggcgcggcgcgggccgcgtgccgccggggacgcggcaaggccgggggacgcaggacgcgtccctccggcttttttgtcagctgcggcccagaatggccccggcgatgccgcccccggccacgcccatggccaggtcgctgaggtaggcggtgaagggcagctgctggccggagagcagcgcgtagaggcccacgcccagcgccatgtaaatcagccccagcaaagcgccccacatgaggccccggtcgcttccgcggccgctcatgacccagacgcccacgaagatggaagccagcttgatgagctggttgaccacgcgcacgacggtatcgctgggacggagccactgcatcagcagggcgaaaagcagcacgcacgccagcgtgacgcccacggcggtcaacaggccgcgcaggaggcgcggggcacggctgcggcgcgaccgcctgcgcggggggcgggcggcggccggggtggcataggttgcaggcataagaaaaacctccctctgttcgctttggtacaggatatgcgaacggggggaggcttcatgcccggaaagggcgtcagttgaggacctcgctgtcgttttcgatggcgacttcctccacgttgcggatggcccagcgggcaaagaccagcttgacattgtcgcggcccacgctgagctcgatggtatcgtccttgatggaggtgatggtgccgtagatgccgccgatggtgcatacgcggtcgccgttcttgagggcggccagcatttccttgaccttcttgtccttcttcttctgcggacggatcagcaggaagtagaacaccacgaacatgagaaccagcggcaggatcatgcccagcatttcgcccacgcccgcggtggcggtggcggcggccgcatcagtggcggcggcgtccgcggcgccggtggcggcgtcggtcagacccatcagcatttgagtgagtgcgttcatcgtttggtaaacccctttccaaagtggtaaggatgattatagcaaatccttacgcaaagcacaagcgcaaaaaagcgtgcggcctccgccgggggcagggcgggccgtcagaggctgcggtggttgcggcaggggccgcgcagcaggtcgcccgccccggccccgccgggaatgggcatgcgaagcagcgtgccggccaccgaggccgtctggacggattcgcccgtcgtatccagcgtcatgcgggagacggtgaaggcgcgcgggcccgccggggtgagcacctccagcgcgtcgcccacgtagaagcggtttttcaggcgcacgaggcactcgccgccgtccggcgcgcccgctaccacgtcgcccacgtattccatcgactgcgtgaagccctccgcgccgccgggcgtctcgggcgggccgaagtaaaagcccgtggtaagcgtgcggtggctggcctttcggacctccgcaagcagctccggcacggcccggcggtacgcctccgcgccctcccgctccaagaggtccagcgcgcggcggtaggccgacaccaccgtggccacgtaataggcggttttcatgcggccctcgatcttgaggctggcaacgcccgcgtcccgcaggcggtccagatggccgatcatgcacaaatcgcctgcggaatacaggtacgtgccccgctcgtcctcgtagacgggcaggtactcgccggggcgcttctcctccgtcaggtggtagcgccagcggcagggctgggcgcacgcgccgcggttggcgctgcggccggtgagcgccgcgctgagcaggcagcgcccgctgtaggccacgcacatggccccgtgcacgaacgcctccagcgccatgtccggggagagcgcgcggcgcagggccgcgatgtcctccaggcgcatctcccgcgccagcaccacgcgcgtggcgcccgtgaccgcgcgcagcgcctccgccgccggggcgttcaacacgctcagctgcgtgctcaaatgcagcgcaaggcctggaacctgcctgcgcagctccgccgccacgcccacgtcggccacgatggccgcgtccacgcccgcctccagcgcctcgcgcgccgtatccacgaagtccgcaagctcgccgtccgtggcaagggcgttgatcgcggcatagaagcgcgcgccctgcgcgtggcacaggcgcacggcctccggaagcgccgccgcgtcaaaattgcccgcgaaggcgcgcaggctgtgccgcgaaagcccgccgtacaccgcgtccgcgccgaagcgcagcgcagctttcagctgctccatgccccccgcgggggcgagcagctccatcctttgcatggtcacatgccccgctcctcgtcgtatgccttccacagcggcgcgtagatggccacggcgcgctcgtgctcctccagcgtgcggctgaagtgaagctcgccggtgctggggtccttgctgcagaagtacaggtatttttcggccacgtagctctcgtccgggtacagggccgcgttgatggcctccggcgaggggttgcagatggggcctacgggcaggccgctgaccttgtaggtgttgtagggggaatccaccgccaggtcgctctggcgcagcgccatgcgccgctcgcccgtcacgtagtgcacggtcgggtcgctctggagcagcatgccctgatcgaggcggttgtggaacaccgcgctcaccttggcaaagtccgccttcttggcctccttctcgatcatggaggccagggtgaggacctgatccatcgtcatgccgatctcctcggcgcgcgcctgccattcggcggtaaagaccttgtccgtctgggagagcagctttttgatgatgtccagcgcgcttgcgtcggtgtagatctcataggtgttgggcgcgaggtagccctccagcaggtagcggcggctttcgacgttttcggtcttgagctcctcgtcgatgaagtagtagtccgtgacgccctcgccggtcttgcagatattcaggaactccgaggtatcgtcaaagatgcccttttccttgagcgattcggcgatgacctccaccgtggtgccggggatgatggtgatgtcggtggtgatggggttgccgtcgccggtggtgagcaggtccgcgatttcaaagacgtccatgctctttttgatgaggtagtcgcccgcctgaatcttctggccaaggcccgcgaagtcgcagtaatacttgaaaaaggtgcggctcttgatgaggccctgctcctcaaggttgttggccacgcgggtgaggctgttgccgctctccacggaaaaggcgtactcctgcgtgtccgcgggatcgacggggctgatgaaatgctcgtccaccgccgcatacacgcccgacgccagcccaaagacgatgagcagggacgcaagcacaatcagtacgggccggaggatattccacagcccgctgtaccagtaaaagccgtattcgcgctcgtcgcgcaaggattcatggtcgtattcccggttggggtcgcgctttcttgacaaaacgccgcctccttttacatgtcgccgatctccgcgccgatatccgccgcctccgcaacgcgctccatcaccgcggcggccaggcgctgcgcgctcatgcgcgacagcagataggccgatacctcgtcgctttcgtagagcaaagcgcttaaacgctcaaattcccgcgcgtcctccggctttggctccacgcccgcggccgccgccatgcgcagcgccgcctcagcccgcgtgaaacgctcaagcagccgccggctgacctcgtcctccatgacgctttcgcgcaggcgcgcgcaggtccggaagggctccgtttccctgagcgccgcaagcagcgcgtccgtggcgctcgccacctcatatggcagttccatgacataagcccctcctttcgcgcctatctagtataacgcaaacgggcaaaaatttcatgccttttttgcattccgcgcgcggaggcgcgcatatcgtttggcaagcgcaacgcaaggaggtttttgcatggacaaaacgttcgacctgtacagggacatcgccgagcgcaccgacggcgacgtatacatcggcgtggtgggcccggtgcgcacgggcaagagcacgctcatcgcccgcatgatggaaaagctcgtcctgcccgccatggcgcccggcccgcgccgcgaccgcctttcggacgagctgccccagagcggcagcggccgcaccatcatgaccacgcagcccaagttcgtgcccggcgaggccgtgaccgtgacgctgggcgaccaggccacggtgcgcgtgcgcatggtggacagcgtgggctatctggtggagggggcgctcggcaccgaggaggacggggccgcgcgcatggtgcacaccccgtggtttgactacgacatcccctttgagcaggcggcggagacgggcacgcgcaaggtgatcgccgaccacgccaccatcgggctggtggtgaccaccgacggcaccgtggccgacctgccgcgcgagagctacaccgcggcggaggagcgggtggtcagcgagctcaagacccttggcaagcccttcatcgtggtgctcaactcccgcacgcccgacgccccggatgcccagcgcctgcgcgagcgcctggccgggcgctacggcgtgcccgtgatggcgatgaatgtcaaggagatggaagtggacgacatcctggggatgtttgagcaggtgctgtttcagtttccgctgcgcgagatccgcatcgccgtgcccgactggctcagcgccctggacgaggggcactggctggccgcgcatgtgctggagggcgtgcgcgccggggcggtgcaggtcacgcgcgtgggcgattacgccgcctttgccggggcgtttgccgattcgccttacaccgagggcctcaaaaacgagggcatcgacctggggcaggggcgcgtcaggttctccctgccgctcaaggacgggctgttcaaccgcgtgctgggcgaggagtgcggcacggagatccgcggcgacgcgcatcttttgcgcctgatgaaggagctggtggccgccaagaccgaatacgaccacgtggccgacgcactcaagagcgtgcgcgagacgggctacggcctggtgacccccacgatgaacgagctgactttgcaggagccggagatcgtcaagcagggaagccgcttcggcgtgcggctgaaggccaacgcgccgtctctgcacctcatccgcgtggacatcgaaaccgaggtcagccccgtggtgggcaccgaaaagcagagcgaggagctggtgcgctacctgctggaggagtttgaaaacgatccccagcgcatctggaacaccgatttcttcggcaagagcctgcacgagctggtgcgcgagggcctgagcaacaagctcatgcgcatgcccgccgacgcgcaggagaaggtgcaggagacgctgtccaagatcatcaacgagggcaacggggggatgatctgcatactgctgtagggcgtcggaaaagctcggctggcgccgatcttttccgccggggtttgcgccggccgcctacttcgccggcggctttgccgccggctcgccgggcggcggccggcgtaaggtagccttgcttgcgcaaggctgccgaatccaccgcgcatgtcgctggattcggatttcagcttggagagctgcggctctccaaacctctgagggatggtgcgggcgagaggcccggcggtatgcgccgccgtttgccgcttgccgcgtttcttgtgtcccggttgctcaatcatttgcgcttccctgacggtcgcgctcatggtttcgctgccccgcttcgggtcgctttgggccttcggcccaagtgcccacagggcacacgcttcccttcgcgcctttggacactcgaaacgctcgcgcgcagcgggggcgggggaggcccgcacccatggcgcgagcggtgggcgcggggacgcgcctaccgcggcgggagcgggcgcatgcagcggggcttctgccgactgggacaaggagcatggcccggcgaggacagccgcgggggtgcggcgaggcgcgtttcttgcatcccggttgctcaatcattcgcgcttccctgccggtcgcgctcatggtttcgctgccccgcttcgggtcgctttgggccttcggcccaacagcccacagggctgacgcttcccttcgcgcctttggacactcgaaacgctcgcgcgcagcgggggcgggggaggcccgcacccatggcgcgagcggtgggcgcggggacgcgcctaccgcggcgggagcgggcgcatgcagcggggcttctgccgggcggtgcggaggagcatggcccggcataggccgccacagggtgcggggagacgcgtttcttgcgccgcaagggcgctcgcaacgctcgcgcgcagcggggcctttgtcggacggtgctgaggagcatggcccggcggggacagccgcagggtgcggggagacgcgtttcttgcgcctttcaggcgctcgcaacgctcgcgccgcctgcgttcgccgcaaagacggcccatgccatagcgagcggtcaaagggcagggaccctttgacataagcgagcggcgacctagcccataccgcgcacagcgcgggcggccgctcatggcggccgcacgtgcgaagcaacacataagcgagcgacgaccaagcccataccgcgcacagcgcgtgcggccgctcacagcggccgcacgtgcgcagtaactttttccgcaaaaacggttgacaaggcgaaaagatggtgctatcattcctgcaagcaacgcagaaggaggcagagccggtatgaaagcagcacgcatggaccacagctccgcctattactttacctttagctttacgtttgcgcgtaaggctcttttgcgttgtgctgtgtgaggaacaggaaaaagggtttccacccccgcggccaatgccgcgggggttttttcatgaacgaaggaggcggcggtccccatgatcgtgattctcaagaagcatcccgatgaaaagcagctgaacaacctgatggcctggctcaagagcctgaacatcgacattcatccctccgagggcgccacgcatctggtgctggggctggtgggggatacctcggtggtggacatcgaccttttgcgggcgctggacatcgtcgaggacgtcaagcgcgtgcaggagccctacaagaacgccaaccgcaagttccacgaggaggacagcgtcatccccgtggggaacacgcaggtgggcggcggcgtgttttccgtgatcgccgggccgtgcagcatcgaaagcgaggagcaggtgtgcctgatcgccgcggcggtgaaggcctcgggcgcgacgatgctgcgcggcggcgcgttcaagccgcgcacctcgccctacgccttccaggggctgcgggggcacgggctggagctgcttctgaaggccaagcgcttaaccggcctgcccgtggtcacggagatcatggacctaagccagcttccgctctttgacgaggtggacgtgatccaggtcggcgcgcgcaacatgcagaacttcgagctgctcaaggagctgggccacacgggaaagcccatcctcatcaagcgcgggctggccaacaccctgcaggagctgctcatgagcgccgagtacgtcatggccgggggcaacgaaaaggtgatcctctgcgagcgcggcatccgcacctttgagacggccacgcgcaacaccctcgacctctccgccgtgcccatgctcaaaaagctcacccacctgccggtgatcgtggaccccagccacgccacgggcatctcgtggatggtcaagcccatggcgcgggccgccaccgccgcgggcgcggacggcctgatgatcgaggtgcacaacgaccccaaacgcgccctgtgcgacggcgcgcagtcgctgacgccggaggcgttccgcgacgtgatggagggcgtgcgcgcggttctgccgcatgcctggcatatgccgaaggagggcgtgtgacatggacatcggcgtggtgggcctggggctgatcggcggctccatggcaaagacgattcgccgcaacaccccgcacacggtgctgggcacggacaccgacccccaggtgatgtacaaggcccggctgctggaggccatcgacggcgatctgaccgacgagcggctggccatctgcgacatcgtgttcatcgccacctggccccgcgcggcggtaacctacgtacaggagcacgccgcggcgttcaaaaagggcgcgtgggtgatcgacctgtgcggcgtcaagcgcgcggtgtgcaggccgctgtttgagacggcgaaggacaacggctttgtgttcatcggcgggcaccccatggcgggcatcgagtactggggcttcgaccatgcgacggcgacgctgtttgacaacgcctccatgattttgaccccgccgccggggaccggcatccagacgctgtcggacctcaagcacttcttccgcggcctgggcttcgggcgggtggtgatgaccacgccggaggagcacgaccggctgatcggttacacgtcgcagctggcgcacgtggtgtccagcgcgtatgtgaaaagcccggaggcgatgaagcaccccggcttctcggcgggcagcttcaaggacatgacgcgcgtggcgcggctgagcgaaaagatgtggacggagctgtttttgctcaaccgcgacgaactgcaaagcgagctggacgcgctgattgagcaccttgaggagtaccgcgcggcgctctccgccggggacgcggaggggctggaaaggctgctgcgcgaggggcgcgagcgcaaggagatcgtggaccggaaggaggacgagccatgagatgcgtggaggtgcgggccgggcggccctatgaggtattcatcggccgggggctgatggacgcggcgggtggcatgattgtcgaggcgctgggcgggacgcgcatggccgccatcctgaccgacgacaccgtggatgcgctctacggcgcgcgggtggagcaggcgctttccgaaagcgggctgcgcacctgccgcttcgccatgccccacggcgaggcccacaagacgctggcaacgtgggaaaagatgctcgccttcctctcggagcagggcatgacgcgcgcggacgcggtggtagcgctgggcggcggcgtgccgggcgacgtggcgggctttgccgcggcgtgctaccagcgcggcgtggatctggtgcagatccccacgactttgcttgccatgatcgacagcagcgtgggcggcaagacgggcgtggacctggggggacttaagaaccaggtgggggcgttccatcagccgcggctggtgctgatcgacccggacgcgctttccaccttgcccgcggccacgctttcggacggcgcggcggaggcggtcaagtacggcgtgctgggcgatacggagctgtttgaacggctctcccgcggcggatggacggaggacgccgagtgggtgatcgagcggtgcgttttccacaaggccgcgctggtggccgccgacgagctcgaccggggcagccgacagctgctcaaccttggccacacgctgggacacgccattgaaaagtgcagcggtttccgtttctcgcacggacaggcggtggccgtgggcatgatctacgccgcgcggatcgcgcggagcatgggcctgtgcgggccggaggtggaggcggacatcgccgccgcgctcacggctggcggcctgcccctctccgcgccctacggggcggcggagctggccgcggcggccatggcggacaagaagcgcgcgggcggggaaatcacgctggtcctgccccgcgcgatcggccggtgcgagctcaggcgcgtgccggcggcggagctggaggaactggcgcgcgtggcggtggggggctgaggccccgaaggccaagccaaatggaggaacgctggcgcgcgcgggggctgcggagccggaagcgatgcgcgcgtggcggcggggggttgaggccccgaaggccgaatcaaggagcgctggcgcgcgtggggggctgcggagccgaaagcgatgcgcgcgtggcggcggggggctgaggccccgaaggccgaatcaaggaacgctggcgcgcgggggctgcggagccggaagcgatgcgcgcgtgacggtggggactgaggccccgaaggccgaatcaaggaacgctggcgcgtgcggagggctgcggagccggaagcgatgcgcgtggcggcgggggctgaggcccctgacgatcaatcagacgaaagaaggacgattgcgatggagattcaggagatcaggaaacggatcgacgaggcggacgagcagctggtgcaggcgtttgccaagcgcatgcgcgcggcgagcgacatcgccgactacaagcgcgagcatggcctgcccgtatgggacccggcgcgcgagcgcgaggtgatggcgaagcagacgaaggcggtggacggggacatggcgatgtacgtcaagctcctctacaacaccatctttgacatcagccgcagctaccagcagcgcaggctccatcgcggcggggagctgggcaaccgcattgcccgcgccatcgcggaaacgccgaaaaccttcccccgcgaggccgtggtggcctgtcagggcgtggagggggcgtacagccagcaggcatgcgacaagctgttcgcgctgccgtccatcatgtatttcaagcgcttcgagggcgtgtttcaggccatcgaaagcgggctgtgccgctacggcgtattgccgattgaaaacagctcctacggctcggtcacggaggtctacgacctgatgcggcgctaccgcttttccatcgtacgcagtgtgcgcctcaagatcgaccaccggctcgtcgcccggcccggcgcgaccctctcctccatccgcgagatcgtcagccatgagcaggccatcggccagtgctccgcgttcctcaagaccctcaaggacgtgaagatcaccgtttgcgaaaacaccgccatggccgcccagatggtgagccagagcggccgcgacgacatcgccgccatctcctcgcccgcctgcgcgggcctgtacggcctgcgcgtgctcaagagcgacatctccgactccgacagcaacttcacccgcttcatctgcatctccaaggagctggaaatctaccccggcgcggacaaggtgagcctgatgctcaacgtcccgcaccgccccggcgcgctctacggcatgatcgcgcgcttcgcggccctgggcctgaacctgaccaagctggagagccggcccatcgcaggcacggacttcgagttcatgttctactttgacctggacgcctcggtctacgacgaggacgcgctgggccttctgtgcgagctggacgagggcccggaggcgttcacctacctgggcagctattcggagggctgagatgcgctgcggactgatcggcgaaaagctggggcacagccattccaaaacgctgcacgggctgctcgcggactaccgctacgacctgatcgagctggcgccggaggagctggggccgttccttaaaaagggcgaatttgacgggctgaacgtgacgattccctacaagcaggcggtgatcccgtatctgcgcgagctcagccccacggcgcaggccatcggcagcgtcaacaccatcgtgcgcaggccggacggcagcctctttggcgacaacaccgacgcctacggccttggcgtgatcaccgggcgcgcgggcatggccttcgccggaaccaagacgctcattctgggcagcggcggcacgtccaaaacggcgcgccacgtggtggaggcggcgggcggcgaggcggtgaccgtctcgcgcacgggcgaaaccaactacgaaaaccttgagcggcacgcggacgcggcttggctcatcaacgccacgcccgtgggcatgtaccccaaagtgcaggccgccccggtggacctcgcgcggcttacgaaccttcgcggcgtagcggacgtgat

SEQ ID NO: 4612 - DNA, 3731 bp, Unknown
  16S sequences of unknown bacteria
gccgcacactccatcatatccatatgagggattttctcgactggccgcaggcgatgtcaaaagccgtattgatcatcccaacctgcggaccgtttccatgactgacgataatctcatgcccctgagcgatgagaccgatcagagagggacaagcctccctgattttttcccgctgttcggccgcattgtctcccaacgcattgcctcccagcgcaattacgatccgtgacatttctgtaatcctcctatcccgtctgccggcggtccgcttttcttcaggccaaactgcagtcctgcccttctcttccggacagaccggccgtctccgctccgcgtttacctaacgacaggagccggctgctgctgcgtgatgcagtgaatattgccgccgccgtacacgacctctctggtataaacgccgaccgcctttcgttccgggaacatttcagcgatctgttccagcgccagtttatcgttttcatcaccgtactgaggtacgatgacagcgccgttgactatggtgaaattcatataagaagcgatgcagacttcgccgtcctctctcggaatcgtaccttccaccgcgtcgatggtcgccgcgcctttcaggagaaccggttctttcgtcagacacagcttgtgcaccctgagctttctgcccttggcatctgtcgcctcacacagcgtccggtatgcctcctgcgcctcccggtaaaacggatggttctcatcctccgtccagatacaagccacctctccgggacgcacaaagcaggccacgtcgtcgatatgaccgttggtctcctccggatcgataccgtctttgatccagattactttgtcgatattcaagtagtctcccagcatcttttcgatctgagacttatccatatgcggatttcttccttctgaaagcagacacatttccgtcgtcagcagggtgccttccccgtccacatgaaaagatccgccctccaggacaaagccgtctgtccggtaagaatcgatattctcaatctcacagacttttcttccgatctggtcgtcattggcccacggaaagtaaagcccgtcatacagtcctccccaggcgttgaattcccagtccacaccgcggacctctcctctgtcgtttacgacaaatgtggggccgcagtcgcgaatccaggcatcgtcgttggccatctccaccacgcggatatgatccggcagcttcgctctgcagttctgatactgtgaagctgacacgcatacagtaacgggctcaaaatccgcgatagctttggctacattggcgaaagcctcctgcgccggtttcgcgccgtctctccagttatcatttctctcaggccagagcatccacattcccgcctgtttttcaaattcgccgggcattcggaaaccgtcctgccgcggcgtagtattcataattctctttgccattttttactcccttccgcaaatttacatctctgcaattaatcccgctgagatcccttcgggatcttcagcgcccaaatgatcacttctccgatgatcagcgatacgatcgttcccacggtaatcggcagaaccgacatcagtgtctccgaatcgaaactgaacggcaccgctgtaaatagaatggaaaccaccagcaaaatcatcggcacataggtgatgatatgaagcatcgttctgcctccgggaactttaaacgggcgaaccgtatccggatccttgctcctcagtttcaggaaagcagggaacataaccacataagataccagaagcatgaccagattcagagcgaagaaactccagaagagatccgactccggcagaagagctccgatgataacgatggccgacgccagaagaccgttcatcacagctgctcccgtcggcatatcattctttccgctccgctttccgaaatacgccggcagatccccgttatccgccgcataagccgctacgctgtttaccccgaaagaccaggaaatcatatttccgaataaagtcagcaggaacagaactcctacgatgatcagcaccgtacccgccagtcctccggctcctgaaagcagcaggctgaaactgtcgatcagacctgagctcgtggaaatttcgctggtagggattgccacaccgataccgaaagctgaaaaaatatagataagtgcaattacgataccgccagtaataatcgcctgcgggatctgtttcttcgggttctgcatcgtcggcgcataggtacagataacctcaaacccgagaaaattaaaaatgatgacagaaatataagacagactgttgagatcgaaagatggcagaagcgaacgcaccgtgtattcattcgccacaccttttgtgaccgctgtgcagattcccagcactcctatgccggcggccagcagcagcttgatgcaggcggacaggttgagaatccaggcgctgtcggaaacagggtaaaaactgatccacactacaatccacacaaatgccagctggatgagaagagaaagccaggtgctgatattcgcccctgtgcagataccgatgatctccggaaacataacagccagagacgccatccacaaagggaaattaacccagtaataccacgcggtacgggaacccattctgcgtccgtacgctttggagatccagtcatacagcccgccttctccgtcgtacgtcgtccccagctccgctgagatcagaccgtatggaagcagaaatccgataatcataaaaatccaccagaaatactgggaattcccgatcgccgccaccggcgccgccgcttctgcgacaaagacaacacagataacagcgaggatcgcgtccatcagcctgaattttttcttattttcgttcattgctatagacctcttttctaaaaatattgcagaaaacggtcaaactgcagggaatcttccggcatcggctgtgatgctgctcccgtcagtctgtcccgctttcagcgccgcgctgtctattcgaaacagctgtcagcgtcaaacggcggaattccgcactcgtcgaagcatccgcacaggatccggctgtccagaaaattctgaagagattctctggccgcagcgatttccagcggactgtgtttctgccgtcctctcatgaagtacaccaggatgcctctcatcgcggtcagacgatttccagcttcgtcgaaagcgatggaaatatcgctgtccagcacttcatcggtcacttcctcgcccctggtcgccggcaggcagtgcatgaacttgcagcccagatttcccatctgaatcagctcgcggtttacctggaattctccgaatttcttgattcgctcttccttcggcagctcgttttcatacagaccgtaccatacatcagtatagacaaaatccgcgcccttcatcgctttttccttatcctccgtcaccagccagcttccgccggaaacctggcagttcatctccatgatggaccggtgatcttcgctcagctgtgcgttcttcggaccgtagtggcagaaactcatccctaacttcgtggtgataaatccgagagaagcgcatacctgtgtagcgtcgcccacaaagactactttgcagtcttccagccgtttgcccctcggaagattctccacaatcgtgcatatatcgccgatctcctgcgtaggatgattgtaatcggacatgccgttgatcaccggaatcgtacaggaagccgccagcttttcgacggaatcgtgt

SEQ ID NO: 4613 - DNA, 24414 bp, Unknown
  16S sequences of unknown bacteria
tccgttcgtacaagagcgggcgaagacaagggtgctgtcaaggtagaagaattcttagcgcaggctctcgaagaaatcagaacaaaggcaagataacaagacaaataaacaggactggcttacagcggaaatgctgcgggtcagtccttttttgttcatataaaattgttctaacgagggagactaataaatatatgtattatacagcttttatcagtcggacaattatatatctgtctttttaagctcttcaaggcaggagcggcagatgcgtttgtccttgtacataattacatcatcagcgtctccgcagaaaatgcagcagggctcgtacttcttcagtacaactctgtctttttcaacgaaaatttcaacgggatctttcggtccgaggtcgaggcgctttctggtttcgatcggcagaacaattcttccgagctcgtcaacttttcttactataccaagggatttcatttttataagtctccttaatctatttattataattaacaaatgcttaatttctaatgtatacatagtttaccatgtaaattctggaatgtcaatacaaaaatgtcaaattttgtagcaaatattatatttatcaatgcattaacaattatataacaaatatcagaggtttttgtatgatatggttgtgtttcgcagctattaccgtagtatcgtttgtatgtgctgctgtatgcggaaatttgcagcttatgacgactgctgttgtcgacggatgcatgaaaagtgtaaaaatagcacttgagttgtcgggcggcgcggttttctggtgcggagttatgagagtgctgcttgacgggggagttctccgctttctcagctgtgttctcacacccgttttgtcctttgctttcccgagagcgtggaggagcggagagggcagggaagagataaccgccgcgatatgtgcgaatatgctcgggataggaaacgccgccactccgtatgctctctctgccatgaagaaaatggacggggacgggaacgagggagacatggggacttttgccgttctcggaacctgctccgcgagtataattccgacgacgcttatcacgctgagacgagccgcgggttctgttgagccgtacagtattgtcgtgccgatatggctgtgctctctctcgtgcgcgcttatcggagttgtgctctcgcgcatcttcggaaggaatggcgcatgaccgcggagaaaatatcgtcgcttgccgtgcctgctgtgattctgctgttctgcttctgccttgtgcgtggtagggggagcgcgtatgaatcgttcatgaaaggcgcgaaggacggactgaaaacctcactcagcgtgtttcctgtaatgacactgctcatagtctccctcagtatgttcagcgcaagcggggcggcggagatgatatcgtcttttctttctcctgtctgctcacgtctcggagtgcctgaggggataatcccgcttgtcgtaatgcgtccgttttccggctcggcttccactgcggcgtattccgctcttctcgataaattcggtgcggacagcttcgagagctttgcggcgtcggttataatgggttcgggagacacgcttgtgtatgttatatcggtgtactactcggcggtcaaagcgaagaagagcgggtatgtctttccggtgtcagcctttgtcgcgctgttcgctgttttcttcggctgtaccctcgcgcgattgtttatgaattaattctgccgtcagtgcataccttaccctatcgccgtcaagaatagtctaaacagatttacggcattatacggacggtgtactatggttaaaggatgtcagagaaagatatactacttaaaaaacacgggaagcaagtattttgaagaggcttatcttgtcttgaagcgtgaggagaacggcaaagctcaggcaagccaaacggagctgtcgcgcgaggcggagagaataataaaggaagctctcccgtgtcagggcggatttgacatttcgcgttatacaacaactcccgtcatcggaaaagccatgtcgtttgcgctcggagccgcgtcttcgtccgcacttatcggcatagtcgcgcttctcataagcttttcgtaacacggaattacaaaatatgcggcaaatttttacactctatgatatatgcgccaaaatgacgggcggaaattaaaatattatttacttgacgggaatgttgacattggtgtataatataaatatgttaatttgtcgccggagacgtgtttagtcggcgtaatttatcacgaaaaacaaaataagcaggcattaccgtaagtgctccgccgccttcggagttcacgcggtacagacagtgtcggcttttgttgaggaaattctgattgtcagcttatgtcggatatttattgagtatactctgaatagcaacctaaaatcagaatatcctcgtcgggcgcagtttttttatagcacccttatttctctattgccgttttgccaaccgaacgttttgcgcggcgcggctttatactcgccctgtgtttttccgaagtagaatgtacatattaacaagaaacagaccgaactacagaaaatttaaagaaaggtgatcctatggcaaaaaagcaaaacagcaaggttcgcgtaatgatgctcggcggactgaacgaaataggtaagaacattgctgtcatcgaatatgaaaacgatatcatagtcatcgactgcggacttgcgttcccggatgaagatatgctcggcgtagaccttgtgataccggatttcacttaccttgagaagaacgcgtcaaagattcgcggcatactcattacgcacggacacgaggaccatatcggcggtcttccttacctgctcaaaagcataaacgtaccggtttacggaacaagacttactctcggaatcgtcgaaagcaagctggctgagcacaagcttctcggagagcgcgagcttattacggtagaagcaggaaccgtcttaaagctcggcgtgttcaaatgcgaatttatcagagcgaaccactccattgccgacgcgtgcatgatagccgtaaaaactcccgagggaaacatactccacacaggcgacttcaaactcgacgtttccccaatcggcggagaaatgatggacctcacaagaatcggcgagtacggcagagagggaatacttcttctcatgtgcgagagtacgaacgtcgaccaccccggctttactccgtcggagaagagagtgggcgcgtcgcttgacctcatcttcatgacgaataccgacaagcgtatcatcatagccacattctcgtcaaatgtacacagagtacagcaaattataaattccagcgtaaaatacggacgcaaggtagcgataaccggcagaagtatgctcaatgttgtcggcgcggcggttcgtctcggatatatggacgttccggcaggcgcgcttatagatatagcggatatcaaccgttaccccgcggagaaaattacgatagttacaaccggttctcagggtgaacctatgtctgcgctgtaccgtatggcgttctccgaccattctcaggtggagcttactccccgcgaccttgtggttctctcgtctcacgctatccccggaaacgaaaagctcgtgtcgagaatcatcaacgagatgtataaaaagggagtcagcgtgtaccatgacgaagcggtagttcacgtctcgggtcacgcttgtcaggaagaattaaagctcattcacgctctcacaaagccgaagtatttcatgcccatccacggtgaataccaccacctcatgcagcataaggagcttgcagagtacatgggcatggatccgcagaacatattcctcatggatatcggtcaggtgctcgagcttgacagaaactcctgcaagaagaacggcactgttccctccggcagaatgcttgtcgacggttacggggtgggagacgtcggaaatatcgtcctcagagacagacgccacctcgcgcaggacggacttatcgtagttgtcgcgacggttgacatagacgaagccaccatagtttccggaccggaccttatctcgaggggatttgtgtacgtccgtgaaagcgaagagctcatggataacgtaaaggagcttgtgcgcggcgtgctttgcgatactcttgactcgggagtaacggagtggactcagatgaaaacgaacgtcaaggattcgctcacgaagtatctctacaccaagacaaagcgcaagcccatgatactgcccatcattatgaatgtatgatttttaaggagcaaaaacatgattaagcatattattttatggaagctgaagagcgagatgaccgcggaagaaaaaagcgcggctaagcttgaagcaaagacgagactggagagcttaaacggcaggatagacggacttgtctctctaagagtagtgacggacggtctttctacctcaaacgccgacatgatgctcgactctcagttcaccacaaccgaagctctcgcaggatatcaggtgaaccccctgcatcttgaagcggcaggatttgtccgctcggtcgttgagacaagactctgcctcgactttgaagactgatggcagactgtaaaaaagcggagctgctttcccccgcaggaaattttgaaaagctcaaggcggcggtgaattacggtgcggacgctgtgtaccttgccggaagaaacttcggtatgcgcgcggcatctaccaactttgaccgtgacgagcttatcgcggcggtttactattgccacagccacaacgtaaagctgtatgtgacggtgaacgttatgccgcacacaagcgaatacgaggagctgtccgactacatccgcttccttgacgaggtgggagttgacgctgtaattgtagcagacatcggtgttgttatgctcatacgtgagatagcgccgtcgcttgaaatacacatatccacacagacaagcgcggtatctgctcaggcttgcattgcgtggcataagctcggagcaaagagagtggttctcgcgcgtgagcttacaatgaaggatatcatagagatacggaagaacattcccgattctcttgagatagaggcgttcgttcacggagctatgtgtatcgcgtacagcggaagatgtctcctctcgaactatttcacgggaagagacgccaaccacggagcgtgcgcacagtcgtgcagatggaagtattctccaacggctatcgacctcgcggaatcaaacagacccgatatcccctccgtcgccacagcgtatgaggaaaaaggcgagacgttctttatgtcctcccgcgacacctcgatgatagagcatataccggagcttgaagaatcgggcataacaagctacaaaatcgagggaagagtaaagagcgcgtactataccgccgtcgtcacgaatacctatagaatggcaatcgacgcgtacagacgtgaccccgcgggctacaaattcgataaagcatggctgaatgagcttgacggagtgagccaccgcgaatacggaacgggattttattttactccgccgtcgcaggacgcaaataccgtgcatgacctcggctacatccgcgaaaaggcatatattgcctcagctgtatcggacgcggcagtacccgacgaaaacggaatgtatgacgcactgttcattcagcggaacaaggtcacaaaggacgacacagtggagcttatcacccccggcaaggtcggaagagcgttttcagcttcgtctctctccgatgttcagggagagaaaatagaatccgcgccgcacccgtccatgtatttcagactgaaagtgccgtttcccgtgaaagagggcgacatccttcgtctcggaggaaattgacgaatgaattttttagacatactgaaagcgtttctcatcggagtgatacagggaattaccgaatggctccctatatcctccacgggacacatgatactgttcgagcagttctgcggtatgaacgtttcggagcagtttatggagatgttccgcgtagtgatacagttcggctccatacttgcggtcgttatactgtactggaagagactgttcccgttctgcccgtcagcaggaaaagcagagagaaagagcatatggaagctctggctgaaaatcgtcattgcagtcattcccgcaggcgttgtcggagtgctgtttgacgatatccttgacaagtacctctacaattacataacagtcgcagccgcgctcatcatatacggcgttgcgttcatcgttatcgagaggatgcacaagacgaaaaagtatcccataacctccgttgacgacatcgacgcaaagaccgcactgaaaataggcgcgttccagacactttcgctcatccccggaacatcccgctcaggctctacaataatcggagctatgtgcgtcggcgtttcccgtacacctgcggctgagttctcgttcttcctcgcggttcccgtaatgttcggcgcaagtcttttgaaaatcgcgaaatacgccgtaaactacggtcttgcgttctccccgtccgagattgtcacgctcgttgtcggaattctgaccgcgtttgtcgtgtcccttgtcgcgataaagttccttgtaggctttgtacgccgtcacagcttcgagttcttcggatggtaccgtatcgtactcggagttgcggttattgcgtacttcctcataacaaaataaaacatatccggctttgtatggctttattgctgtgcgagccggtttttgtcatatatccccgcgaatcggacaaaaatcacactgactgttatgtaaagattgacacacgcgcggcataatgatataatcaagcaggaaatttatatgaaaaacaaggtaaaataacatgacatattacgactatataacatcgggcgagcacaaaaaacaccgccgccccgcatttgacggaagagatatcgccgctgagttttcagccgaatttctgccgccggaagagagaatgacaagacgctttgaagctctctgcgcaaacgaggaagctcacattttcaacggacagaagatagttttcatgcgcacctcctccgattttcccgatgtattcacgcccgacgagtggacggagataaaaaagacccacttcatccacgagcttggctatacttcaaacgtaacccccgactacaaaagagttatctcacgcggattttgtgaaatactcgccgacgagcgtacaaacgaatacgaaaagagagaaataaacgctctcatgtcggttgtcgaaaaatacagagcggaagccgagagaatcggacgggacgacgtttacaaagtgctttcaagagtgccgtgggaagctccgcgtacattccgtgaggcgttgcagtttttccgcattgtccactacgctctctggctcgagggaacatatcatgtcacctgcggcagattcgataagtatatgtacccgtactacaaggctgacattgacgcaggaaggctaaccgacgaagaagcgcttgacctcgtgacggacttcttcctctcgttcaatatcgactccgacctttaccccggagttcagcagggagacaacggacagtcaatggttctcggcggatgcgacgctgacggaaacgactggttcacgcgcctgtccgagatttgcctgctcgcctcgggtaagaataagctcatcgacccgaagataaatatgcgcgtctcaaagtcaactcctgcggacagatttgtcaagggaagccgccttaccgctgtaggaatgggattcccgcagtattcaaacgacgatgtggttatacccggacttgaaaagctcggatatgctcacgaggacgcggcggaatacggagttgcggcttgctgggagttcatcgtgcccggaaacggatttgatgtagcaaacattgcagccttgtcgttcccgaaagtggtagataacgttctccaccgcgactttgcttcatgcaagacaaaggaagagctcacgacggcagtgaagaaagaaatcgccgctcagtgtgcgaatatcacctcatccgtgaagaatctgtggttcgttcccgcgcccttccttacgctgttctttgacgcaccgcacggagatgtttcgcgaggctcaaagtacaacaatttcggcgcgcacggtacgggaatatcaactgcggctgactctcttgcggctatggtgaagtatgtcatcgaagacaaaaccgtgaccgcggaagagcttaccgaagccgttgactcggattttgaaaagcacagcgagctgctgccgattctcagaaacgaagctccgaagatgggcgcggaaaacggcgaagaagctgacgaatgggctgtccttctgctcagtacctttgccgaggagatgagcgaataccgcaactgccgcggaggatgctggagagcgggtacgggttccgcaatgtactacctctggcacgcgagcgagattggcgcatcccccgacggaagaagaaagggagagcctttcggtacaaactactccccctcactgttcgcgaaaactcccggtccggtttcgataatccgcagcttcacgaagccggagctcgtcaataacgtaaacggcggtcctcttacactggagtttgactcgtccgtgttcagtgaagcagacgctcccgaaaagctcggcgcacttgtgagatattttatcgctctcggcggtcatcagcttcagctcaattccgtatcaaaggacgttctgcttgacgcacaggctcatccggaaaagtacccccgtctgatagtccgtatctggggatggagcgcgtacttcacagagcttgacaagccgtatcaggatcacgttatcgcaagacaggaatataagctgtaatggacggtaaatttgatataaaagaattcgcagaccgcgatgccgagggaaaagtctttgacataaaagaattcgcggtacatgacggagagggagtccgcactactgtatttttaaagggctgtccgctatcttgtacatggtgtcataatcccgagggacagtcgccttatcccgaaatcgtggagaaagcgggatgcgtgaagtgcggcagatgtcgagcaggctgtaatcatcccgaatgtcagccgtttggaagatgtctccatgcctgcccgaaaggactgctcagagtggcaggacagaagatgtcgtcccatgctctcgcgaaaaagctgtgccgtgactcggttttatacgaaatgagcggcggcggagttactctatcgggcggagaacctcttatgcagggcggattctgcgtctcgctccttcataagctcggagagtacggtatcaaccgcgccattgaaacgagcggatttgcgtccgacgaggtgttccgtgcggtgcttgacgaatgcgactacgttttctgcgacttaaagattgcggacagcgcggttcacaagaaatacacgggcgttccgaacgagcagatactgcgaaacatcgacacgctcagaaaatccggcaaaaagtacaggataagagttccgctgattcccgggataacggacacggacgaaaatcttgccggaatacgcgcgctcacgtccgaggatgaggtgcagtacctgccgtacaacaagctcgcgggtgcaaaatacgctcagctcgggcgggagttcaagctggaaaaatgaaataaacaaacaatatccgtcggagaaaatgactttgttcttgacttcggcggattttttgtcggttgacagaacttcgtagcgtgtgatataattcaaatgaaatcctaacagtacgggagaaaaacaatgctgtaccttccggtaaaaccgagctataacaaaatcgacaaaaaatcatatatcaaggtgagaagctgctactatatctccgtgagcaatgagatgctgtacagcagaagatttctcgaaagctgcgagcttatgtacgtcatgagcggaagaatctatatctcggctgacggtgttgagtacacgataggcgaaaacgaggtgctaatactgccgagatacaaggtggtgagcagtgtgaagaggacggactaccgcacgagattctgcacagtcgaattcatctgctcggacgacgtgatatacccgcttgccggagcagtagttccggtgcttagcgactccgtgtatttccgcgagcttgtctcaagccttgagcagtcctttacgggtgcggatggggacgacagttttcagagcgacgcagttctcttgaccatgctttacgagatacggaaaaattacgagagatgcgtgaagaacatgggaaacaaggatctctcgggagacgtgatgaagtatgttgacgagaacattgacaaaatcatttcggtagacgagatagccgagcatttttcgtacagcaaggactacctcatacgcagattccgtgagcaaagcggatataccttgaaaaaatacataaacgagaagaaaatgaacatagcgaagcggcttctcacaagcacggaaatgagtgtggaaaaggtgggcggttcgataggctacgacgacatagatttatttataaagtttttcaagtatcacgaggggataacgccttcaaaataccgcaagattaacaagtaggaggagacgatgaagctgacaataaccgaaaaatatcttgtgcttccgataaatccgagcgtgagagaaaagcacattaccatatcggacgaaaacggaactgtcgtgtttgattttgacgttcctcttgacgcggtgaatcctaagtataaaagctatataaatgtagaacggttcatcggcgggagctattatgtgagcatatccccagacgcaaagtttgcctgctcgcttgaagacagaatgcctgacgacggaatagatgaagcgcgtccgtttgtgcattacactacccaccgaggatggctgagcgacccgaacggactgttttactacggtggggaataccacatgatgtaccagtacaatcctgccgcgcctgtctggggtagaagtatgcactggggacatgcgacctcgaccgaccttctccactggacggagcttgacccggttctgtatcccgatgaggacggcgcgatgttctccggctctgcatgggtggattcggaaaacgcgtcgggtctgggtgacggtgagcattctccgatactgctgttctatacggcggcgggcggagttaccgagcagtctgctatggcagggaagagcttcacacagtgcatggcatattctctcgacggcggcaggacatttgtaaagtacgacaaaaatccgctcataccgtgcatattgtcggagaaccgcgacccgagagtgatgtactccgccgagatgaaaaaatacgtgatgcttctctatatggagaacaacagatacacgctgtttacgtcggaaaatctccttttgtgggagagagcgcaggatattgagctgaagggcgacaacgaatgtcccgacttttatccgctcaaaagcatagagggtgaggtgctgtgggtgttctccggcgggaacgactactacactgtcggaaagatgacgcgccagggcttttcccccatacagaatccgcgcccgttcaatttcggcggaagatgcagtcacgcgggacaggttttcgtgagcaccgatttcgcaaagcgcggctctattgctgacagatgcgtgagactgatttacgagaatatgcacatgaccgacctcccatttgaaaatcagataggctttcccacggagatgtcgctctcaaagttcggggatatatacagacttcgcgcggttccggttcgtgagatagaaaagctctacgtctcgtcggaattgacagaaaacgtttcggtgaagaaaaaaatcggtttttcacgtcatcttgagataggcgcgtatgacttgaagctgcggtgcaaaaagacggtgagcccgtttaccataacgctttttggtgtgtcgctttatatttctcccgaggaaaacaggataactctcgaaaactcgcagaatattgaaaacgatatgccgctgtcgttcagtatgggagagattgaactcagaatactgtacgatacggcgggtattgagctttttgccgacggcggacttatatgctacacttcatcagtgcagtctgactacggtatgtcctacctcagacttgacgcacaggagaacaccgtcatagattcgcttgagataaaccgactgaaaagcgcgcgtccgatgctcggaaaattacgtctgtaacttaaagagcaagagaaaagtcgttttttctccgttttgactgatatcttctgttgcaatatccgtcggggtaatatataatggaattgaaaacaaaagagaaacttatacaatattgtttttgcagtaaatgttttttaaagataatttcaagaatgtttgaaactgcaacaatgatgttcgcaggcacactggtgaaacggtatactgtgtgctacaattagaccaaagaaacattaggaggacaaaaaatgtcaaactacaagttcaacggaatcggaacaaatctttccaatctcgcaactctttccgatgcaaagacgcgttcaataagcccggaaaacttcgacggcgcaaagggcaaggccggaatggctacagaaggcaccggcgcaggatgtgcaagagacctcggtcagggatggaagttatctccctcggtaagaatcgagcctcacacgacatacacaatggctgaaatcgacggctcgggcgtgataaaccacatctggctcacaccggcaggcgcacctggaagatacgttatcatccgtatgtactgggacggaagcgatgttcccgcagtcgaatgccccctcggagatttcttcgcaaatgcatacgttcccgcgttcaagcagatgagctcccttgcggtatgcgtaaacccgagaaacggtctcaactgctactggacaatgccttttaaaaagagctgccgcatcacggttgaaaacctcgcggatgacgtgttcacgctctactatcaggtagactatcagctcacagaagttcccgaggactgcggctacttccacgctcagttcagaagaagcaaccccgtaccctataaggaagttcacacaatcctcgacggtgttgaaggcaagggtcattatgtaggaacatacatggcttggggcgtcaacaacaacggctggtggggcgagggcgagataaagttcttcatggacggcgacggagaattcccgactatctgcagcacaggcacagaggactacttctgcggcgcgtacaacttcgataacgaacaccgctatgaacccttctgcacaccttacaccggcatgattccctacgctcccgacggactttacacatctcagcagcgcttctccctctacagatggcacatcacagaccccattcgctttgacgaagatctcaaggttacaattcaggctctcggctggcgctcctacggcagatacctccccatgcaggacgatgtttcatccgtagcgttcttctacctagacaagcccgcgacaaagcttcccgctctccccgacagagactatctcgaaataatctgacttaaataaatgacttaaaaagaggataattatcatgaaaaaaatatcggttcttctttccgctatcgttgtagccgcactgtgcgtaacaggcgtatcggctatggaaggcaatgatgttactgcatacggcacgcctatcgctcagacaaccgaacctcagggcggcggcaaccatgatatcggcgttatagttgacggcgtagttcccgcatccgacgcaggttcaggcgaacagtacgacacatttcacggcaacaccgatccttacgaagaatacttcggacttgatttcggcggcgacgtaacctttaccggatttgaattcacggaaggcatgcatttcggcgacggcggatactttgttgacggtactctccgactccagatctgccagaacggaacatggaacgatgttgctgccacaaacgaagtcggttatcccgtaggtacggcacaggctgatttcggcgataactttgagacatacacattcgagtgcgaacccacagtgggtactgctatacgcgttatcggtacggcaggcggaagcgacacagttcgttttgcatcctgcgcagaggtaaaggcgttcgctgcatccgatatgtccggattcactacatatgcggataagctcgctgcagaaaaggctgccgcagcagaagccgcaaatgccgccgcactcaagagagccgaagaaggctttatcgaaggcatatccacacctatcactacatacaccatcgaagagatttccgcagtcagcggcggttccaaggatctcgcaactatcaacgacggctatattcccgttgaaggcgacacatacgataagcagtttgacacagtaaacaatgttggtaagtgggaaccctaccatgaagaatatataggctacgaattccccggaacatacactgtcgaatacgttgagttccacgaaggcggaaacttctatgacggcggcttcttctccgacggtgagatttggcttgaagctctcataaacggcgaatggacaagaatcgacagcgatgtttctcccgaatacaagtacggcgaaactcaggaagatatgaagcctgactatgaaacttacactctcacacctaagactcccgtaacctgcgacggtatcagagtaacaggctgtgcaggcggaagcgcatacttcatttcctgcggcgagcttattgttaaggcaagcgtaagcgaaacagcacctgcagccgaaacagaagcagcagttgaagaaacagttgccgaaaccgaagcagaaacagttgctgaagagactgtagctgaaaccgaagctccggttgccgaagaaactacagcggcagaggaaaccgtaaaagaagccgtagctcccgaaacagctgacgaaaatgctgaaaaagctcctcagacagctgaccttgctctcatttcggcagcagtagcggcagtatcttcactcggcgcgtatgttgtaagcaagaagagaagataaactaaataatagactttatgtaaacggctgcggtatggttttgtgccacagccgttcataatatccgaattaaatgaataatagattaaaaatcttgcttggacttgtgactttaactttgcttgcttcatgcgcgaagaacgatactcccgagagcgtcactcttcgtttgggagtcggcggagtcggagggcaggtctggggcgagaaagagcagactgtcttgtacggcgaaagctccaaaccggtgtcggagagcgcggacaagggattcgtgtttgacggatggtactcgaacggcgtgaaaacctccgatgctcccgtgcttgccatggacgagatgaaggagaacacggaaatcaccgctcgtttcagtcaggagcacaccgacatcccgctcatcgtgattgataccgaaaacggaagtacggtaagctcgcgcggggactatctctcctgcggcgtcactgtgtccgacccgaataacgacgaaaactgcggaaactacactgcgcagattcgcggaagaggaaacgcgtcgtggaactttcaaaaaaaaggctacaagataaagttcagctcaaagacaaacctgcttggcataggaagcgagaaaaacaaggactgggtgctcgtatcgtgtcacggagatcagtccatgctccgcaactacattacaagccgaatgggtcagctgctcgacggaattgagtattctccctcctgctcgtatgccgaggtgataatgaacggcagttatctcggggtgtatctcgtgtcggagcaggttgaagaaaagtccggcagaatcatatcctcgcaggacagcgaaagctacgacgagaactcatatcttatcgagcttgatatgtacgccgccggagagccgtttgtagattatattgcagtcggttctcaaccgtattctatcaaatccgaggtcacaaaagaagagggcgaatatatccttgactttatgaaaaaggcggacgcggcggtgaaaagcggaaacaagtcggaaatggaaaactacatctgcctgccttcccttgtagatacatttataattcaggagttttcaaaaaacatcgacgtcggatggtcaagcctttatatcctgaaggaacccgacggacttctccattacaccgcgccgtgggattttgatttggctttcggcaacgactacagacttgacaacggaagcgcggaaaagctctacgcagcctacggaagggacggttttgagcagaacaacggatggtttataaagctgtggtcgtactcatggttcagagaagagattgcgcggcgttggtttgaaatcggcgatattctcgacacggtgtatgacgaaacgaaagcattcggcgagaagctggaagaaccgatggagcgcaactacgagaagtggaacagcttaaaatcgcgcacgcatatgcagcccgacagcattctccgcctgaacagctacagtgagcacgttgaatatctgctcgaatggtacaacgaaagacgcgaatacctcgacaaaacatacgaacattatataaaataggaaaggaaacaacaatgaaagcaaaaagaacgttatctttcactctggcggtaattttgtcccttctcgcaatgtcatcgtgcagccagaacaacgcgggtgaaactacacctgagacagagccgaatatacaggcacaggctgaatccgatgttcccgagacggaagcggaagcagacccgttcgacggacttgaaacaagagacatgggaggacttaccttcacgttcctcacaagcaactggccgggcgaagccgtgtggaccgttgacgacatttctgcggaagaatacacaggagctccgataaacgacgcggtttatgagagaaatctcgccgtagaggacagactcaagtgcaaaatcgccgaggtcaaccttgcaagtgcagccgacgcgagtaccgctctcggaaattccatcacttcagccgataacgcgtatcagatttggattccgagattccacgactatctgaacgctgccgcacagggttatgttacagacttaaacaaagtaaaggacatagacttcactcgcgacgcatgggtaaagaattccattgacggactgtcgttcatgggatattcctttacagcctgcaacgagatgattaccatccacaaggaagccgtatcttcgataatcttcaacaagagccttgccgagcagtatcgattcgaggacttatataatgtagtaaacgaaggtcgctggacgctcgactatttctcgcagcttgttgagacagcatcttcggatgaagacggcgacggcgcaatgaccgagaacgaccgcttcggattcttctaccagagagatacccttgacgctttcctcgccgcaggacagggtgcgctctgtgaaaaggatgaaaacgacaagccggtttacacaatggataccgaaaaggttatcgacattctcaacgccgcaacagacctcatgtacaaccagaacatatgcttcaacgtaatgaacgcgaccggcgacttcaacgagtggatgacaaacaagtttatgggcgacgacgctatgttcatgtgggtgagaaacgtcaacattccgcagctccgcaccatggaaaacgacttcggtattctccccattccgaaatataatgacactatagacaactattactccgcagtcaactcatataccggcgctggtgtgtccgttgcgaatatcagtgattcaaattatctcgacaatataggtctgttcatcgagactatgggcgcggcgtctatgaataccctctgcaaggcttactatgacgttatgctcaacggtattgtcgttcgcgacgcgcagtctcagacgatgcttgacataatctatgcaaacaccacatacgacgcaggctctataggatgctacgcaaacatcagcgactacatttatatgatgatgagctacaacaaaaactttgcttcgtacagcgcgggtgtaaagaaggctgtgaataaggcgattgacaagcttgagggcaaaatcgaagaacgatacggagagtaatgaaaaagctgtgcaataggcttgttatcttgttcgcggttctgctcgctctgcctgtctgcgcagagaacaagttctgtgaagttggattcaaggcgatatcatcctccgaggggcatgagggcgcgggaataatcgacgttatccgagacggatatattccgaaagctgacagaatccgcgagcagtaccgtgcttatcccgaaaacggcgaggcatacataggctacaacttcggcggcgaatattccgtgaatacgctcctgttttatcccgggcttatcggtgaggacggaggagaatttacggatgtgcgctgcgaggtgctgacgggcggcgtgtggagcacagttgaagcttacttcactcccgaatatccgtcagatacgcttgagaacggctgttattccgtgaattttgaacctgtgctggctgagggcattcgtcttatcggcagtgctgactatgtttcctgctcggagctgaaggtgctgtgcgatgtggaggaagttccggtgatggaaattgacgattcgctgtggatagaaagctctgccactccgatagcgacggttacagttcccgacataagcggaggaagccgtgatattaccgacataaacgacggatacatcccgaaagaaggcgacccgtactccatgcagtatgatacggtcactgctttaggcaaaaacgagccgcatgaagagtacatcgggcttatgttcggcagggactacgagatagagcttatcgaattcacggagggcggaaacttctgggacggcggttggttcgctgacggcagtatgagagttgaggtaaatatcgactacaactggatagtgacagacttcaccgtaacgccggattacccgaactcaaacaatcgcgaggattttctgccagactatgaaacgtacaccatccgccttgacaatcccgtgaaatgccgcggaatacgtcttgcgggaaaagcgggaggggaagcaaacttcatctcttgcggagaattccgtgtaaaacgagtcgaggagaagcaggaaatcgtcgaaaccgcgcctgaaaccgaaattgacacggaaaacggcgaaatcgcggaaaatgttaataaatattcgtatatttatataatttttgcggttataatattagcagtagcagccggagttgttattttggttaaagtgattaaaacaaaacgcacgaaaacaaaataaactccacaatagccttgaagggaaaacaataacatgacgacaatcgaaaaaataacaaacggaaaaaccgcgctcggaattgagttcggctcgacaagaatcaaagccgttcttatagacgaggactgcacccccgttgcaagcggcggatacgactgggaaaaccgacttgaaaacggatactggacgtactctctcgacgatattatgacgggtctgcgctcctcctacgcgtctctgaagcagaacgtgcgcgaaaaatacggcgtaacacttacaaaagcaggcgcgataggtatctcaggcatgatgcacggatatctcgcatttgacgaaaacgacaagctcctgaccccgttcagaacatggcgcaacacgacaaccgccgaagccgcagaagagctgtcgcctgcactggactttaatgttcctcagagatggagctgcgcacatctttatcaggcggtgctgagcggtgaagagcatgttccgcatatagcgcatatcacaacactcgcgggttacatacattatctgctcacaggacgccgtgaagtcggtatcggtgaagcgtcgggtatattcccgatagactccgataagctgtgctatgacgagaaaaagctcgccgtgtacaacgaaaagctctccgcccacggtgtatcttttagggcagaggacgtgttcccgagcgtaagacccgcaggttgcagcggtgccgttctcacagaagagggagccgcgattcttgacgccgacggtgagcttgaatgcggtattccgatgtgcccgccggagggagacgcaggaaccggcatggtagcgacgaacgctgtcagagtgcgtacgggcaatatttcagcaggaacttcggttttctccatgcttgtgcttgacaaaaagctctcgcgcacatatcccgagatagacatggtaacgacacccgacggctcacccgtagctatggtacactgcaataactgctgcggtgagattgacgcgtgggcaaagattttcggcgaattcgcggcggctgcgggacttgatattccgaaatacaaggtgtacgacacgctctactaccttgctcttcgcggggagggcgactgcggcggagttgtttcgtataacttcctctccggcgagcacatcctcggagtaaaatcaggtcatcccatgtatttcagaagcgaggacggcaaaatgaacctcccgaacttcttccgtgcgcaggtttattcttccgttgcggcgctgaaaacaggcatggatctgcttctccgtgacgagggcgtcaaggctgactgcttcacgggacacggcggacttttcaaaaccgaaggcgttgctcagcagttccttgccgacgcgataaacactccggtttccgtcatgaaaacagcgggagagggcggagcgtggggcatggctatccttgcagagtacatggtgaacggcggcggaaaaactctccccgactaccttgacgaggacgtgttctcgtcgatggaatcctcaactctcgctcccacaaaggatggaaacgagggctttgagaagtacgtcgaaaactacaaggcgggacttgccgcgcagtacgcactctgtaaataaatgaaaaaaacgcatccgaaccgactgccaaaccttccattcgttagttctttgttctaactcttgggggcagggctggcaaaagcaaacggcgggtgcgttatttttatgcagcaaaaaagccctgaatcaatacagaatcagagcttatgtaacggagaaggagagatttgaactctcgcgccggttaacccgacctacacccttagcaggggcgcctcttcggcctcttgagtacttctccgtagtactgccccgggcagccgcttgcagaacccggaacgcatacattatacacgatgcggggcgatttgtcaagagatttttgaaaaaacggagaaaacggcagttacttttttgccgcggcgctcatgatcccgtttgaatagtgtttgcttgctcaaatcacgtccggaaaaatgcagattgcacattttatcttgactttcgggcggatttcggttataatgacgcaaggattaccatattccgcaaacagaaaggaataaatgccatgagcttctggatatgtgctgacgaatatccgacggaaacgcatctgtactattttacccatactttttctgccgctccgggtgcgacgctgacagcccgctcctgcggcgacacccgctaccgcctgctgctgaacgggcatccggtctgcgagggtccctgtcagggatcgtcctatgtccgctactacgaggagagtgacctgactcccttcctgcttcccggcgagaatacgctgacggcagaggtgctgtatgcgcaagagggatcgtttatctctgtctaccgcggttcacgccctgccttctggctggatggctgtctgacagcgccggacggtgacaggcgcccgctcggcaccgacggcagctgggaatgcacgcgcgaagatgccgtcgggttctaccatgttcccggcgtgcatacctccgtgccgccttttgaggaggtgcgcggcgcatccgtccggacgccggtacagaccagacagatgtatgagccggatcttggcgggaaaggctacaatattttcggactgcgggaatactacccgctgacgccgcgccccatcccgcagatggaaaccggcgagccgcatccctttacggtattgcgcaggggcgacggctggatggagctggatgccggcgcgtataccactgccaaggtgtcctttggcttcactgccgccgccggcgcgtgcgtgaagattatctatgccgagtgcgtgtctgtcgcggacgcggagggcaaccgacacaaggagctgcgggacgcatggaacgaccccaccgcgcgcgtggagggcgtgtacgatacggtgtatgcaaccggggaacggcaaagcttttcaccgttctggtatcgtgcattccgctttgtccggctggagtttccggcggatgcgggctttgagccggatgtcatgacctttgccccttacttctatcccatggacgtcacgggcagctttttctgctcggacgggcggctcaaccggatgtgggatatcagccggaacacggtgctgtgctgcacgcacgaaatgtatgtggactgcccttactacgagcagcagcagtacgacatggattcctgcctggagatgctgtttaccttccgcctgaccgccgatgcacggatgccgctcaagagtctgacagaccttgcccattcgcagatggcggacggaatgctccaggcgaactatccttccaccggggtacagatcatcccggatttcacgctgttctgggtgctgatgctgcgggaatacctgcgttacgcgggaaccgacggggcggcgtgcgaaccggtgcgcgcgctgaccggcacgatggataaggcgctgggcgtgtttgaaaactacatgaccgacagcggactgatcggtcccactccctactggcccttcgtggactgggtgccgggctggcaggtcggcgtgccggacggcgggcgcgaggagccgctgaccgtgacctgcctgatgtatgccgccgctctgcgtgcaggcgcggagatatgccggacgctggggcgtgcagagcgcgccgccgagtacgagcgccgtgcggctgccatgattgatcgcgtcaacgcgctctgctatgacgccgatgccgggctgtatcgcaatacgccctcgcgccgggagttcagccagcatacgacgctttgggctgttctgtccggggcggtgcgcggcgaggaagccggtgcgctggtagaccgtacctttgacgggcacgttccggtggcggtctgtaccttctccatgaaccattatctgttccgtgcgctggaaatggcagggcgctatgaagcctacgcgccgcgcctgctggagggctggcagcggatgcttgatctgcattgcaccacgtggtgcgagaatccggattcgccccggagcgagtgccacggctggtcatcggcaccaatctatgaattctcccgcatggttcttggtgcattcccgacccgggacggctggagtcatgtatcggttcagccctgcccgccggaaggactgtcctttgcggaagggtccgtccccacgccgtatggggatctgttcatccgttgggagcgcagggacggcgatttcacactgaccgtgcgcaaaccggagggagcgccgctgtgcgtgacggctgtcctgccggacggactggctgtgcccatgggctcggactgcagtctgaccgccagctgtaccctgtaatatccggacgcaaacacctgggggggtaaaaactcattttgagtttttacccccccagatgacgttaaggaaacgctgatttagtgaggcacccctttgacagagcaccaacgtgtgcatgaacgcctatgcgggatgccgcaaacccatcacggcgcgatgacccgcacgctgacttctccgctgtgcagaatacgtattccgtccggcgtctcgacaatcagaccgaagttgctgtccacgccccggacgacgccatccagtatctcattcccacgcgtcgcccgcacggactgcccggtcagtgtcaggcggcggcggtactcctccagggtcgcgggtgcggtgactgtgtccgtgttcagcatggtcagaagctcgcgggcgatctgcccgcagagcattcccacgtccagcggcgcgcggcgcggggagtcagcgtccagcagacatccggcaggtgcccgcaagccggacggaaattccgccgttgtcagattgatgccccagcctgccgcaaggtaggtctcccccgcgcgcggcgtgacggcttcggtcagaatgccgcagacctttccgccgctccggtataggtcattgacccacttgatgccggtttcgactccggcaaccgtccggatagcacggcttgctgcg

SEQ ID NO: 4614 - DNA, 8109 bp, Unknown
  16S sequences of unknown bacteria
tgccttttcctcggctcacaatgccgatgttccaatggtaaatggctatgggtactgtcataaaaagcaccccagtgttcctgcgcgctggtttttttaatggctttttcccgcgaaaagcgataaagcggcgcgacgataaaatacgccagcgttccctcttttctggccgaacacttcgaaaaaaaagccctttatccgtacacggcacaaaaaactgacatatcgaaaaggatgccgcttaactctttctgtggttttccgccagccacgcaacggccagcggcgtcatccgaaaatatacgccataaggatccagacccggccccggcttatgataagaactgtgggcgggattctccggatcataccaaatcagcgtttcatcccccgcctcagcggtcccgttcgaccgatgatatacctcgctcctcgtataactttcgccgtccaccgtataagtatcgtagattctcacacggaagtctctcacccattcccgcttaaaaaccactcctggcacggcagtccaatctttgtattcttcggttctgatctgaaaaatgagtattgaactggcaaccagcaaaagtaaaacaaccaccggcgccacaaatcggaaaaaagaatgagattttttctccataaaatccaccgtcctgccttggtatagcacaaaatgatctcgccggcgaaaaagcggctcattgctgcattcctgcagcaaacatcattcccaccgtatcaggcaaacatattgcatatcccgatccgccttttggtgcggcccgataaagtcagcatcacggcgaccagaaggccatcttcgcagctcatcctaaaaaaggcctgcgctttcccttgccgccggccaacttgtcccgttctgtccggtactttgcaaatcctcttttgttttgacaaacggatcagaaattttcaccaagctgcggcgcctgatacctgtccatccggctaatggcattttgcgtctgttcaaaattttccagtgcaaaatatcgggtgctggatcgtctgcccgtgccatacaccgtttcctgaaacacaatggttccgtttccatttttatggatccggatactcatgggaggaagatcccatgcatcgtacatcgcaatgcgatttccccgtttgatcatgatttttttgtttgtgattgcgtaaaatgtcctgcctcttaaccggagcctttggataaaggccccgaataccaaatacactcctatgccgataaacggcaatccaaacaatgaagaaaaaagcggtgcgctgcttttcaaagccgccacctcccaaaacagggaaaagccagccacacaatcccgaacggaaggagcacaaaatcctgcccggtaaaaagtctccctttttctggcattcccgtccacaacacctgctcttgatcggtcagataaggtttataaaaatggtaattttctgtaccattcattccacagcacctcctatccggtattgtaccgtttggcgctgcattttgcaaaaggatagactttcctttggccgttatcgcctcgcaacccttcctctttgcagcttaccggcgtgtacgccgaagaaaaaactcttttttcggagatattttgctttgggcaaaaagttttcacctgttcccttttatccaaagaaaaaacaccattcttttaaagccggctgcagattttttacgtcaaatacgtgtcctttatctgaccagcaggagccgcaaactgaatacactctgttccatgataaatcgatacgataaccttttgaaaagccccttcgctgtataaaaatattgctcccggtccgttgacgcgttcatgatagaaagaaaaagaaaacaaggaaaaatcatttttcaatttaccgcatccaatggaagaaatgttatcccaagagaggtttctcccttaaatgatgtccccccttgaaaacatcttcccgaagacaataatgataatgggttctatgtatgtgaatggttcccggcgcgcctaatttcaaaagttttttttatcataaaagccttctaaagtggcgtcgatcttttccggatatggacagaaacataaaaggcccgccgccgtgagaaagataaggatataaatgatccgattcttgtgacaaaaacgcatccctttttccaaaaaacacctggatttcaaacacactctctatcataaaagccaaaaatttttcccattccaacaaagctaagagaaaaccaaacacttttttaagcaactgcagactcttttccccattgtcttttttctttttaaacgctacaataaaagcaaaaaggaggggtccggatggagccgcttatctttcatgtcgatgtcaacagcgcatacctttcttgggaggcggcccggcgcgtagccaacggagagccggatatccggttaatcccttctgccattggcggcgaccggcaaacacgcaccggtgtgattctggccaagtcgattgccgcaaaaaaatatcaggtgcaaacaggagaaccggttgccctggcgctgcgcaaatgtcctcagctttatcttgccaaaccggactttcgtttgtatgaacaaaactccagagcttttatgaatatctgccgcaaatatgcaccggtagttgaaaaattttccattgatgaatgctttttggatatgagcggtaccggacagttgtattctgatccgagggccatcgccagccgaatcaaagatgaaatccgtgatacgctgggctttacggttaacatcggcattggtcccaacaagcttttggccaaaatggcaagtgactttgaaaagcctgacaaaatccacaccctgtttttgcaggaaatcccccaaaagctctggccgctgccggtcgggtctctttttaccgtcgggcgcgccacggcacagcggctggagaaaggtgggattttcaccatcggcggcctggcacatgcagatgtttcctttgtgcaggctctgattggaaaaaaattgggccaacagctgcatgcatacgcaaacggcattgaccaaacaccagtactttccaagccgggagaggccaaggggtacagcaactccacaacgctcgcccgggatgtgcgatccgaagaagaggcaaaccgcatcctgctggcgctggcagacagtgttgcctcccgcatacgtgcggacggtgtgcgggcttactgcgtcagcgtcacgatacgtgcaaatgatttcaaggataaatcccatcaacaaacgcttttggagcctactgatattacagatgaaatatttcgcgtgtccaaaaggctgttcgcccagctttgggatggacaaacgccgctccgcctgctgggaatctccctaaccaaattgacctgtgacgaatatgtgcagcagtcgcttttccctgacgaaaaaaaagaacgggagaaaaaactggatcaggcggtggatcatatacggggtaaattcggttctgacaccatctgccgcggcgctattcttcgttctgatctgcaggtgggcaaaaaatataaatcccagctggatgataagaaaaaataatactttttgcagtacaacaactttttgtaaatttctgcaactttctattgccgaaacgaataaaacaaaaaagacttatcaaccgcatttttaagcgattgataagtcttctggcggagatggagagactcgaactctcgcgccggtttcccagcctacgcccttagcaggggcgcctcgtcaccaacttgagtacatctccaaatggtaacctaaaccaatatttttctttgctgccaggatggaaaatggcggagaggaagggattcgaacccttggctctttcgagtcactggttttcaagaccagctccttaaaccgctcggacacctctccatccgtgacgcaaactattttaacataaccctgcgataaagtcaagaatatcccgataaaatcccctttcttttctgaaaaacgtattattcacagacaatggtggaaatcccatgagaaaaatgctatgatgacgttactttccattcctgttacagaccaagaagggagcgaaactttcatggcaatcaataaagcaatgcgggccgcgctcaaagcgctgtcctatccggatataggcattaaaaaaaattataaagtggagcgggaattggtgaatttgacctccaaacgcatcatcaaaccgcatctttaccgcgtctgggaccatgatattccctgtggagatcatctggttccggtgcgcatctttgccccgccggacgggccaaatcgcccgattctgatttttttccacggcggcggctgggtcaccggcaatatcgacagctacgacggtgtctgcgccgacatggcccacttaacccggcgcatggtggtttcggtggattatcgcttggctccggaatacaaattccccgccgctcccgaggactgttatgctgttgcacgggaaatttatctcaacgattctttgctgggcacccgcccggaggaaattgccctgattggtgacagtgcgggcggcaacctagcggcagctgtttctctgatggcgcgggaccggggagaatttctccccgccaagcagatcctgatttatcccgccactgccgccgaccacagtgaaacatcccctttcccctcggtgcatgaaaatggaaccgactatctgctgacctctaaacgggtgtgcgattatatggacctgtaccgctctggggatgaggatttgcacaatccttattttgccccgctgcaggcggctgattttcgcgaccagccggacaccctaatcatcacagccgaatactgccccctgcgggatgaggcggaggagtacggccaccggctgatgaaagccggaaaccgtgtcacgatccgccggataccggacgcgctgcatggatatttttccctgcccgcccggtttgtgcaggtaaaacgcacctatgaaatcatcaatcggtttttgaaaggatgaggccgtaaatgagcgcgtcagaaccgaaatggatccggttggataacgcagccaaaatatttccctccaccagcagtaagaaagatccgaaggtctttcgtttctcttgcgagttgactgagccggtggacggacagaccctgcaattcgcactggatcagaccatggaaaaatttcctttttaccgctccgtactcaaacgggggctattttggtattatttcgaggacagcacccgccgacctgttgtccagccggagggacttcctccctgtgcgccgatttacagcgcggaccgaaaaggacttttattccgcgtcagttttttcgaacgtcggatcaacttggaggtttaccatgccattgccgacggaaccggtgcactgcactttttgcgcacgttggtttattattacttactggagcgccataaagaggatttttccggcggcgcgcccttttttgattacgatgcttcccatgcgcaaaagcaggatgacagtttttcccgctactacgaaaaaaggccaaaagcgtcaaaaggcaaggctgtaaaagcgtaccaccaatatggagagcgctggccggacaaccgcatcgccgttttggaaggctgcatgccggtgcggtcgctgctgacgcttgcccatacccatcacgccacgctgacggaatatttaaccgcccagctgctgctttccattcgggaaaccatgcgcctgcgggaaaccgggcggccagtggtcatcaccattccagtcaatctgcgcaactattttccctccggcacagcgcggaattttttcggcatcatcaatctgggctatgacttttcccggcaggaagattccatcgaatccgtcatcgcttttataaaggaacaattccagaaggagctgaccgctgagaagcttcgggaacggatgaatgaactttcggccttagagcacaatctgctcacccagcttgtgcctctgatcataaaagacccggtgctccgcctggccaattatctggcggaacgggggattacggctgccttttccaacgtcggaaaggtcgccatgcctctggagatggcacgttatatcgacagctttcacgttttcacctctaccaaccggctgcaggcctgtatgtgttcctttggggagcattgcgttatcagcttttcttcgccatttgtcagtaccgatatccagcgggcctttttccgccgcctgacggcggaaggaattgcggtagaagtcacatccaaccaggaacagttaggtttttaatccaaaaggaggtatccgcatgaaatactgtaaaaaatgccgggtatccgtccccggggatctgcatacctgcccgctatgtcagggggatctgtccggcccgggagaagccgggcgcactgcttttcctgttctccccgcatccccaagccttcacaaggggcttttgcggctgatcgggctggggaccattgcggcggcagctgtctgcattgcggtcaatttaagtctgcctcaaagcggttggtggtctgttttcgtggtcgccggcgtcatcagtttttggctcactttctggatggtcgtaaaaaagcgcggaaacatccccaaagctattctttggcaggtagggctcatttccgcgctggccctgctctgggactggtggaccggcgggcgcttgagctggtcggtcgattttgtcatacctcttctgcttaccggtgcaatgatcgccatggcagtcatcgcccgggtgatgcggctgaaaatccaggactatatcctatatctgatgctggacgccatattcggttttatcccgtttgtccttttgctgtgtggctcccttcgagttgtctacccctcggcggcatgcgtcgcggtaagcattatttcactggctgcgctgtgcctgtatgaagggaaggctatgaaaaatgaaattctccggcggctgcacctgtgattttgctgccgggaaaaggaggtctttgctatgatttgcccgatctgcggcggggaaatggaagaaggcggcctgattgccagcggtatcagtgtcatgtggtttccactgaaacagtttgccaaaaaggggctggagcggctttggtatgagggcggaaagtcagtcggaaagtcgaactaccttctcgaccacacccggattcccggcgcgtattactgccgcagctgccagaaaataatcggcattttcgatatttcccatgatccggaaggggagtaaaacaccgttttacccgcactgcgcagcatcaaaactcaatggttttgatacatcagaggaggtgctgaaaaagggcagaatctattatgacggaggtcggctccaatgaatcggctggaaacggttgggcggactggtcacgatcctgacgctgggaatttgttatccctgggcgttttgcatggtgtatcgccgggaaaccaagcatgccgcggtcaatgggcaccgccgattttcgagacatcgcagctgttcgtcaattggatcaagtgctgactgttgtcgcctttgtattttatagtttttggccgggcattgccctgcgcaatcgggaaaccgggcacacccattttgccaactggctgagtttataaggaggaaaacggatgtctttgtatttgtttttgcccaccgcggctcagcgggtgcaggtggaggaattcaaacaagcctttcagcaggcgggggaagataccatcaacggcagctgcggcctgacccgcttttcatgctacggcgattggcttttttatctggagcgggttcggcagggccgagaaccggacagagtcccctctttcaccttcttggcgggcgacggcaagcagcttgtcggtatcattgatatccgcttgcagctgacccaagcccactattacagcggccatatcggttattccgtccgccctgactgccggggccgcggcatcggtacagagcttctccggctgggcttggaaaaagcgcgtaagctggggcttggccgagtaatgctttcctgccaggaaaacaacctcacttcccgaaagataatcgaggccaatggcggcagattgagcg

SEQ ID NO: 4615 - DNA, 3141 bp, Unknown
  16S sequences of unknown bacteria
gatcatccgcgaggtgacgatcaaagaaagcccgaagtggatgaaggagctgctcatggccagcaacatcaagtccatcaacaacgtggtcgacatctccaacctcgtcatgctggagaccggtcagccgctgcacttcttcgatctgaaccgcctggataaggaagagatcatcgtcagggatgatctgcaatgcaaatacaccgcgctggatgaagcggagtatgatatcgagccgggggatctgatgatcaccgtagacggcaagccggtggccatcgccggcatcatgggcggagacaactccaagatcgaagcagataccaagggcatcctgatcgaggctgccatattcgatcacgtgagcgtgcgcaatacatcccgccgtctcaatctgaacacggatgcttccatccgctatcagaagggcatcgagccggatgcgccgtatgcggcgatggaccgcgccgtgcagctgctcatcgaatatgcggatgccaaaggcatcgagcagacagcatattccgcgccgtggaaagtggagcagcgcaccgttgaggtgaacatcgaccgcatcaacgcgctgctgggcacgcagtttgcggatgcgcagatgatggatgtgctcacccgcctcgcttttgccccggtgcagacaggacggcagatccatgtggagatcccttcataccgccaggatatttccatggaggcggacatcgccgaggagatcatccgcatgatcggttttgacgatctgcccagcacgatgccggtgatgccggccacggtcggtgcgctgaccccgcgtcagcagctgcgccgccgcctgcgcgagctgtttaccggacagggactgtatgaggcagaaacatatacgctgatcggggaaaaggaactggcggatgccatcatgccgctgtccagccatgtgacgctggccgcgccgatgagcgaggaacgcaagatcgtacggacgtccatcctgcccagcctgctggagagcgccgcttataatctggcgcgcagcgtgaaggacgtgccgctcttcgagatcagcagcgtctattcccaggacagcacccaggagcgcttcgcgctcgtgctgtgcggcgatctgcagaagaacagatggcagaaatttgagaccaaggccgatttctataccatcaagggcctggtcgagatgatgctggaagagctgggctatggggagacccgtgtcagcttcaaggccaacacgaaggatacggtgcatttccatccgtatcagagcgccgaggtgtacatcggcaaggacctgctgggcatcttcggcaccatccatccggatatggcgaaagcctatggggtcaagcaggcggtcatgggcgaattctccatggaagtgctgctggacaacaagccggccaaggtgaagtttgagccgatctcccgttatccttccgtatcccgcgacctggcattcgtcgtggatgcgggcacggcggtcgcagacatcatccgcagcatcaagaagtgcggcaagctcgataaggaaaacatcatccaggatgtcgaggtcttcgatgtctatgcgggcgagcatgtcgaggaaggcaagaagtccatcgcgctgagcatcacgttccagtccgcccagcgcacgctcaaggatgaggacatcaaccagatccatgacaaggtgctggaggcgctgcagaaggaagtcggcgcacagctgagagcataagaacagctgaatgtcagcgggcagagggaagacctcgcccgcttttttcgctgatgcgcagggaatgaaaaaaaagcacggcgggatgccgtgcacggtgctcagacgagcaggaacatgacgatgaagtggcaaaggctgccgcccatcacgaacagatggaagatctcatgactgccgaagcatggatgacggtcattgaagatggacagcttcaaggcatagatgacgccgccgatggtgtagatgatgccgccggccagcagccagccgaactgtgcggcgctcaggttgttccacagctgcgggaaggccaggatgcagacccagcccatgccgatatacagcacggaggatacccattttgggcagtagacccagaacagcttgaggatcatgccggcggcggcgatgccccagaccagcgcgagcagcactttgccgatgccctcccacagcgtgagcatgcacaccggcgtatagctgccggcgatcagcacgaagatcatcatgtggtcgatcttcttgcgcagcgtctgcgccttttctgatccatggaaagcgtgatagcatgtgctggccgcatacagcgccatcatgcttaaagagaatacgctcatcgcgatgaccttgcggatgtcgccgctgtgtatggcgagcgagatcagcgggatggcagcgatgaagctcagcacgaagccgatgctgtgggtgatcgcgctgccaggatccttgatgcggcgcaggacatcgggtttctgccgctgtccgtgtgtggaaggaaacagctgcggctgcatgcagaatgctgcggaagaatggttgatatttttcatgagatatacctcctcggttttaaaattacagaatctagtttttaaaactagttcttctgatgtcttcattatatagcatattcagaaaaatgcaaggaggttcacctttttttcagccatgaaaaaagaccagcgatcccggcttgcgggctctggtcttgatcggcctatgatcgggcgagcagatggacgagcgtttcgatcatgacgccggaagcgcctttctgggcataggcacagcctttttcggtctccgcggatccagcgatgtccagatggatccacggcgtgccttccgggacgaattcttccaggaatgccgcggccgggctgctgccgccgccggccttggggacggcgttgaccaggtctgccacactgctgcagtgcagggcgtcatggaacgcacggtcgacaggcaggcgccagatcgcttctccgcaggcatccgcggatcggttcagcgcgtcgaagaagacgtcgtcgttggagaagacgccggtgtagcgttcgcccagcgccgtcacgcaggcgccggtgagcgtcgccatgtcgatgatgcgcgcggcatga

SEQ ID NO: 4616 - DNA, 6906 bp, Unknown
  16S sequences of unknown bacteria
gcgcaggcgatatccttctgctggatgttactccgctgtctctttcaattgagactctcggcggtgtagcaacaaagctgatcgagcgtaataccacgatcccgaccaagaagagccaggtattctccaccgcagcagataaccagacagcggtagatatccacgtcgtacagggtgagagacagttcgcaaaggacaacaagtcccttggccagttccgtctggatggtatcccgccagcaagaagaggtgttccgcagatcgaggttacgttcgatattgatgcaaacggtattgtaaatgtatccgcaaaggatcttggtaccggcaaggagcagcacatcacgatcacttccggatccaacatgtctgattctgagatcgacaaggcagtcaaggaggcagcagagtatgaggctcaggataagaagaagaaggaagcaattgatgtaagaaatgatgcggatgcaatggtattccagaccgagaaggcaatggaagaggttggcgacaagatcgatgcggcggataagactgcagtagaagaggatctgaaggcactcaaggagctggtagagaagaccaatccggaggatatgaccgatgctcagatcgacgacctgaaggctggcaaggagaaactgatgagcagtgctcagaagctcttcgcaaaggtatatgagcaggcacagggtgcagcaggtgcagcaggtgcagcaggtgcaggcccggatatgggtcaggcggcaggcggcagcacagcaggctctcagccggatgatgatgtggttgacggagactacagagaggtctaatatatcagatatataagataaagaaaatacaaatagacgatacccctgcaggagtgattctgcaggggcattgtcccgtataaggtggatggattatggcagagaataagcgggattactacgaagtcctgggtgtggataagaatgcagatgacgcaacactgaaaaaggcgtaccgtgccctggcaaagaaatatcatccggatatgaatccgggcgacaaagaagcagagcagaagtttaaggaggcatccgaggcgtatgccgttctgagtgatccggataagcgcagacagtatgaccagtttggccatgcggcgtttgagcagggtggcggcggagcaggcggctttgacggcttcaatttcagtggagatatgggcgatattttcggcgatattttcggcgatctgtttggcggcggcagacggcgcagcggcggggcgagaggtccgatgcagggagccaatctgcgtaccagcgtccgcatcacctttgaggaggccatttttggctgtgagaaggaaatcgagctgaatatgaaggatgagtgtacgacctgccatggtaccggtgcaaagcccggtacttctccggagacttgtccgaaatgtggcggtaaggggcaggtagtattcacgcagcagtctctgttcggtacggttcagaacgtgcagacctgtccggattgtcgcggtaccggtaagattatccgggataaatgtccggattgccgtggtaccggatacatttcgaataaaaagaagatcaaggtcgttattccggcaggtattgatgatggtcagagtgtacgcatccgtgaaaagggtgagccgggcgtcaacggtggtccgagaggggatctgctcgtggcggtaaatgtcggacggcatccgattttccagagacaggatatggacatttattcgactgtaccgatgtcttatgcacaggcggctttgggcggtgatatcaagatcagtacggtggacggtgatatcatctacaccgtaaagccggggacgcagactgatacgaaggtgcgtttcaagggcaagggtgttccgtcctggagaaataaaaatgtgcgcggtgaccactatgtgacattggttgtacaggtgccgacgaagctgaacgaggcagcaaagcaggcgatccgggacttcgatatggagaccggcaacagccttggacgcactgaggataagaagtcagaaaagtcggaaaagggaaagaagaagggctttatggataagctcaaagagacctttgaggatctggatggtcagaatgaaaaatagatagctgagccggaaaaatggcattgggctcctgcaggattctgtgggggcttttttgctgtaattgacttctgcggggggctatgttaaactaaaacccggatgtttgcaaagctacatggccggatttgtagcaggcctgaaagctctcactgacagatcgcgaagcgactgcgttcatgggcaagtagcgaagccaggccctgtcagcagagctgcagggatggattgcgaatgtccgctttatgcggagggtcagacagaaaatagaaacagaaagaaaatagaaacagaaaggtatgaggacatgcgttggaataaatttacattaaagacaaagaccgatgcggaggatatcgtcatctccgcactggcagacgccggagtcgagggcgtggagatcgaggacaaggtgccgctttctgagtcggacaagcagcagatgtttgtagacattctgccggacggtccggcagatgacgggatcgcctaccttagcttttatctggaggaggatgcggacacggaggcaatcctggcccgcgtggatgaggagctggagacataccgcagctttatggatctgggtgaatgcacgattgagcgcggacagaccgaggataaggactggatcaacaactggaaacagtatttccatcagttttatgtggatgatattctgatcattccgtcctgggaggaagtaaagactgaggatcaggacaagatgattattcatattgatccgggtacggcctttggcaccggtatgcatgagacgacacagctgtgtatgcgtcagctgaaaaagtatgtgaacagcgatacagagctgctcgatgtcgggaccggaagcggtatcctctcgatcgtagcgctgaagctcggagcaaagcatgctgtcggaacggatcttgatccgtgtgcgatcacggcgacaaaggagaacctcgaggtaaatggggttccggagacttccatggatgtcatgatcggaaatatcattacggataaagcggtacaggatgcagttggctatgagaaatatgacattgtagtggcaaatatccttgcggatgtgctcgtaccgctgacgccggtgatccttcatcagctgaaatccggcggcatttacattacttccggtatcattgatgagaaggaagagacggtcgtggaagctgtgaaggcggcaggactggaggtcgtagaggtcacccatcagaacgactgggtatccgtgaccgcacggaagcgctgagcacagaaaggattgagtggagatgtatcatttctttgtggatccgggacagatcgggccgaccgacattgcgatcaccggatcggatgtaaatcatatccggaacgtattgcgcatgcagccgggggaacagatcacagtgagcagcggagaggatgagaaggagtaccgctgtgagatccgggcactctcagaagaggaagtcacggcacatattatgtgggtggaggagaccggtgcggagcttccgtcccgcatcagtctgtttcaggggcttccaaaggcagataagatggagcttgtgattcagaaggcagtcgagcttggcgcttatgagctcgtcccgatggcgactcgtcgggccgtcgtgaagctggatgcgaaaaaagagtcggcaaagctcaagcgatggagtgcaatttccgagagcgcggcgaagcagtcaaagcgccggattattccgcaggtacacagtgtcatggcgtttcgggaggcggtggattatgcggcgtcccagtatgacatctgtctgattccgtatgagctggcagatggtatggagcagacacgcaggattttaaatagcgtgcagcccgggcagtcggtggcgatcctgatcggaccggagggtggcttcgaggagaatgagattcagtacgcaaaagaaaaaggcgtgcttccgatcacgcttggcagacggatcttacggacagagacagcgggcatgacggtgctggcagttttgatgatgcagctggaggggcgccgggtataaagccataagagaagacgacaggccctggcaggattgagaaggtatccggaaggccgacaggaatagagaatatcaggaaggataacggcaatgacaagagaagaatttcagaaattagcagaatccggagtgattttactggatggagcgaccggctccaatctccgtaaggcagggatgccggtcggcgtgagtactgagctgtgggtgctggagcatccgcaggcgattcagaagctgcagatggaatacgcagaagcgggcagccagatcatttatgcgccgaccttttccgcgaatcggatgagtcttgcaatgcatgactttcagggcgatatccggaagctgaatgcagatctggtgagcattacaaaagaggcagtcggagaacgggcctatgtggcgggcgacatgacgacgacgggaaaaatgcttgagccggccggagatacgtcctatcaggagctgatgcaggtctatcaggaacaggcgaaggccctgtataatgccggagtggatctgatcgtagcggaaacgatgctgagtgtggatgagacggtcgtattgctggatgcagtgcagagtgtctgcgatcttccggtgatgtgtacgctgactgtggaagcggatggcacggcgctctttggcggaaatgccgttgaggcggtagagacgctgcaggagatgggtgcggtcgcagtcgggctgaactgctctctgggaccggatcagctggaatcggttgtggcttctatgaagaaggtcgcgcaggtgccggtgatcgcaaagccgaatgcaggtatgccggtcatggatgaatttggcatggcacactacaatatggcaccggagcagtttgcagcatcgatgaagaagctaatcacagctggtgcaggcatcatcggaggatgctgcggaacagatccgtcatatatccggctgctgaatgagatgtgcagaaactagaaaataactggactaataacgcagaatgaaagttcaggcaagctatgtggtacagctatttgctagaagaagcagaaaaatcagaaaggataacaccattatgaaagcgaacgtattttatgtcgcctctcttgcgatgctcagtacggcatggctgtgtgcaatgccggtattggcggcagagactgagacagaagcatccactgcttttccggtgacagttgtggacgcctatgacaacgaagtgacattggatgcagctccgaccagcattgtttcactggcaccgacggatacggagatcctgtatgcgatcggagcaggggaggtcatgaccggaaggacggactactgcaattatccggaggaggcgaccagtctcgattccatcggtacttataaggagccaaatatggagctgattttatccaagtccccggatctggttgtggcatccggttttatcgatgataatattcgtgagcagcttgaggagaacggtaccgcagtttatctgaccggcggcagtgaccgcgagtctattgaggcggatatcacaggccttggtacgctgacgggttatacagacggcgcagaggcagttgtggcagatatggagagcgagtggaatgacctgagcgcaaggcttaagaaggtgacaaacgagaagattgcatttgtagatattggcagtctgtacagtgtaggaccgggttctcttctggatggctccttaagcagcatccatgtgaagaacgttgcggcggatgcagatacgacctggccgcagttttccgctaagaaggtcgtagaggcaaatccggatgtgtacatctcactgtttgctgacctggatgaggtaaaggagactgccggactttctgatctggcctgcctgcagaacgaggatggctttatctgcatcgacggttccggagaagccggagatatgattcagagatccggtccgcgttatgtagagggactgaagctgcttgcagagctgatctatccggaaatcgcagaataaaatgataccagggtcaaaataccttttgaccacaacatcataaaatgagaatggataaaaaataaggccagcgtttcttgcgctggccgtttttcctctatctgttgcgcaagtcgaaaaaaggaataaaataatatgaaggaacaggaacttgcattagaaaacctgagacaccgcattttggaagagcccgggcaggcggatcaggcactctggacggcggtcatcgcttttcaggggtttccgttttataccgcgtccggacttccgttctggtatacgttaaaaagatccgggggcggagagctgattgtttcccgtaaggagggatccaagacgctgacacgcagctcgattctgtatgcatttcacgttgtaatgcatggagcgcatccggcggccaaagctgctgcggatacaggatgggaggagcctaaaggatgccgacggagcaggtatgcgaaggaagcgccgatgtggatgctgtgccaggatatgcaggccatcccggcagaagaccggggggatatcccatcctactgcggtccgaaagagatcggccagatttttggaatttcatatatctacagcatgtttttccggttcgggctgatccgggttccgaagagggtagccgggaagctgttgaacggctcagacaagtcacctgcgcccattgcgcaggagcaataagctctgagtcaagcggatattcgcaatccgcttcgctacttgctcataaccgaatgctgctt

SEQ ID NO: 4617 - DNA, 32759 bp, Unknown
  16S sequences of unknown bacteria
ctgtgaatcctgcgggaaacggtatgactatctgaaaagtgaggcctgccccaactgcggtgcattcaactatatcaagggcgcccatcagcacatctgcggagccgaggatgtggagcgcatcattgagatgaaatccgctgagcatgatgattcccaggaagttgtccgtccggataccagcattgaccggggtctgcagcagaaatatgcccgggccagacagaggctggaccggctggaaaccaccgaagatgtgttcaaatccgcattcggcggtgatttcggcgccaagaaattctcccgtaaagccaagaccaacaaatccaatgccggctgtctgaagccgctggttattttcatcttcatcattgtattcttcaacctgattgctccgctcatctttgcgctgatcagcaacacatttgaaagcagcaattatgaggattatgacatctcgtacagcgaagcgcctgcatcggaatacgaaacaacatacaacagcggtgtgcccggctacacctacaccctcaatgacctgacctttgccatgggcggttctgccattgtggacaccggcgatacactggagccggattacgcggtggttgccgtgaagatggatgcctcctgcggtcttccctccgatgaatacgctgccatgaacttcaccacctatctcaccgacagcgactactacgcctactatcccgcgatggatatgacctcctatgacaatgaagagctggtcaacctcctcttcccggactcctattactacttcctgcaggacttcgagatcgcctacatggatggtcaggagagtgtgagcggttatattccctacctggtggaaaaggaatacctggatgatctctcctatgtgatccagttcgactactatgaccgggagaacggcagctatgaatccgtctgctacaccttcccgctgagtgaaggccagaccatcaccaccgatgaggtcatcgcctcctattacaacagcgcttattgatctacactctgacagccccctctcctgtgagatgggggttgtttttttgctcttttcacggttttctgtgcagttctccaccatctgctgttttcagacttccagatccacgttgccctgccgctttctcccgcctgccggtccgctgcctctccccgctgtatccgtctgacttcactctcttttgcatgatactgcccttgccgcagaatatccccactatgcatgatccagaaaatccattgcagaggaagaaatcagccgttttgcgtgtcagctgggacagaggattttccaacctttttcaaacgctgtacggggaggacgaggcagtgcaccaaaccggatacctgctttgctcgctctagggtaaacgaaaaagaccagcttttcagccggtctttttcgttcatgcacggaggatggattattgtcgtatcacatcaggcccattgcggtgagaatcagccgcatcaggatcatgcccagagccgcgtcaaacagcgggatcaggaacatgagcagtgtgtacttcttattggtttcggttaccagtacgatacgggcatagtgaccaaccagagtacccatcaacatcgagggcattacacagatggtcgcctgtgccgctgtgatcacaccggtctgatagaggttgaaggctgtggcagcacctgctgctttggcaaagaacgcactgatcagaacggtaatcgcctcaccgggcagtccgaagacacccatgatcggtccgcagatattgcccagtacgtccataacgcctgttacattgaagacctgtaccagtacatagcccagaaccatcgcaggcataatggtgttgatggcgattccccagccctttttcgcaccggagagaaatgtttcaatcataccgacctttgccggcttcttagaagtttccgcactcattttgctacctccgcattcttctttttaccacgcatcacgatcaggcggacaatattcgcgcctaccagcttgcagaagatcaccagcaggatcatcggacccatagccattactgcgatgggcagtacagctgcctgggtggagatcatattgccgatgggtgcggagccgggatacatgaacgatacaaaaatagttctctcatcatcggtgatctggccgttgtcatagagctccttggtcagtacagcagcgatatccgaaccattcagggagtttacaaaagccagaccgcagctgccgggcagacccagcagaggccgcaggatgggggtgaacaccttctggaaggcttccataacgcccattttgctgaacacttcaatcagacccatactgaagatacatccgggtgccagcgaaagggcaaacatgaaaccatcccgggcgccggcgccgccgctgcccatgaagttggctccggtatccccgatggtaccgaaggaaccgatcagggtattgaggtccagaacccgcaggaactgcagcggaccttccatattagcgaagaaaccggagaacatacagagcatgatcaccagtgccagccagccctgcggactgactttgatcttttctttttcattctgtactgtttccacagccatgactctactccccctcttacttcttgaactgatccagtgctgccacaaccatgcaccacagttcggtacgctcatacatggattctaccactgcatattcacggtcggtgtggttccactcaccgcgcacaccgcagctgcacagaaccggtacgcccatcatagcgatgttgccggcatccgaaccgccgcccaggacgataccgcccacagcaggatagccttccttttcacagacagtgttgatgaagtccagcagctcgtggttttccttggtgtcttcgaagccgccgccgggctcgccgatggtgaagtcaatgctggtgccatccacatcgggagtctggaagatgcgggtcagctcattcttgacacgctccgcctcggagagatacaggaagcgtccgctgaagtccagggaaactgcatccggaatggcattgggtacggtaccgcccttgatgacagccgggttcatgttggtacccttttccatgtcgttgcagttctggatcgccagaatcttgtatgctgcttctaccagggcattgcgtccggcggtgtagttgttgcctgagtgagcacttacgccatggacattcagatgaccccacatagcccacttgcgtccggtgcagagatcattgttcaccgggccggtctccatgttgaagccagcgatgcagccatccgcccacttctggaactgctcacaggcataggcatggaactttccggcttcctcatcgccgcagaagcagatgcggatgggacgatccttgtagccggctgcttccagagccttgatgacatacagggtgatgatgataccgcccttcatatccagaacgccagggccataggccttgccatcctcaatgcggaaggggttggggccgaaggtgttgggatcaaacacggtatcaaagtgaccggtaaagatcaccggagtaccgggacggtccgcgccgatcacaccggcaactaccgggggaacttcgtcacggacacggtaaacctgacagtctacacctgcctgctggaacttttcgcacagccagtcagcaatggtatgcatagcgtcgggctgacggcagctgccttccatgttcaccaggtcacgccagtcgtcgataatattctgtcggttctgtgcaatgaattcctgaatctgctttttcatcttgatcctcctcattttgtctgtgttttggaaagcgctttagcagtttatcacaagttttcgcccaaaattttagataaaatgttgctgaaactgttggaaaaactgttaaaattgcttcgatttgactaaactatatcgctccggacactctttctctgtaacatttgctactgagaaaaagccgccttcccgtaagatggcggtaggaggagttgagcgttatggaacaatacaaatgctatactgcagactatgccccctatttcaccgcagacatcaatggctggaaacccatcattcagacccagtcgccacggcattacaagcggggcagcatcatctgccagcactatggcgaggaccagaatgtcatcctgatccagactggtctggtgagcatgtccttcctgcatgaaagcggcattgagcgcatccatttcctgggcagcaccgggtatgtctttggattccggagctgtctttccgggcgtccctatggcggagcactcactgccatcaccgatgtttctgcatacaaaattccatcggaggttgtatcccgtgagatgcagaaaaatgaggaattcttccggtttgccatgttcggcgagtacgaacggggaatggtctattcccgcaagctggagttcctggcactgcccaccaacatcaagaaggtggcagccctgctgctgagcatggcctaccgcaccggacatttccgggatggcggcaccatcatacccattcgcatgacccacgaactcatcgccaaaatcatctactcagaccgggtgagcgtatcccgggcagtatccgaactggaaaaacgcgggctgatccgcctgcgaaacagtgaatactgtatcctggatttcgtaggactcaccgatattgtggaggaataaccagacagaaaaaagcctggtcgggtcatccggctttttatattctgtccttattctgcggagaagccgttcatagccagcacaaccgctgcccagagcttgggacgctcgaacatcgactccaccagggcatattcccggtcggtgtggttccactcaccgcggacgccgcagctgcacaggatcggcacgcccatttcggcgatgtagccggcatccgagccgccgcccagcaccacttcgcccactgcgggccagccgttttcctggctgacgctgtccacgaaccggcgcagccgcttgccctcctcggtgacctccaggccgccccgggctgcactgagagtgtactcgctgtgggtaccctctatggtgctctcgccaaacagctttgcaaggccctccttgacccgctccacctctgccagggtggggaaccgtccgctgaagtccagctcacagctgtccgggatggcattcatcacagtgccgcccctgacaatcgccgggttcatgtgggtgcccttttccaggtcgttgagcgcctggatgccgatcaccttgtaggctgcctccaggatggcgttgcgtccggcgaggtagttgttgcccgagtgggcgctcacaccgtggatcacagccttgcctgccatcagatacttccggcctacgcacaggctgttgtccaccggcgctgtttccatattgaagccggcgcagcagccttcgccccagcgacggaactgcgcaatcgccggatcgtggaagtcgccgccctcctcatcgctgcagaagcagacccggatgggacgctcgtcatagccggctgcttccagtgccttgatggtccacagggtgatgatgatgccgcctttcatgtccaggacaccggggccataggccttgtccccttcgatgcggaagggattttccccgaaggtgccggggttgaatacagtgtcaaaatgtccggcgaagatcaccggcttgcccgggcgtccggtgccgatctcacccgctaccaccggcgggatctccggcgacgcactgtaaaccgcacagtccaccccggcttcccggaagcgtccgcagaggtattccgcctcggcgtgcatggcgtcgggctgccgcagactgccctcatggttcaccaatgccttccagtcctccaggatctcctgacgatgctcgtcaatataccggaataccgcctcttttctctggtccatgttgattcctcctcagtttttatagagcaaaggccggaggatttacccccggctctgtctggtacagttgttattcggtcagcggctggaagccaagttccgcattgatggtgcgcagtgccaggatgcagtgttccatcacctgatccagctccatgcccatcatctcagcgccgccgcggatcaggtcacgattcaccttggcagcaaaggccttatccttgaattttttcttcaccgacttcacttccaggtcgagcaggctcttgctgggacgcatcagagccaccgcggtgatgaacccggtgagttcgtccacggtgtagatcaccttttccatctgcttttccggcttgacatcggtgcagaggccatagccgtgggacagaaccgcacggataaagtcctcatcaaagccagcttcccggagatagccgggagtgtactgacagtgctcctcggggtgctcctcatagtcgaggtcatggagcaggccaaccatgccccagtattccacatcttcgccatagaactcggcaaagtgacgcattgcggcctccaccgagattgcatggtggatcagcgactgtgtatgggtgtgtgttttgagaagttccagcgctgctgcgcggtccatgggaagtgccattgtaatcaatcctccgatttttactgaaaatccccccgttccgaacggggagccgaagctgccggtttttccggcttttattgtaagtgtatcaccggttcccgggaaatgcaaggtcagggacggagatttgcctccttgatggtaccgctccggtaggctgccagcagctgcttgaggccgtcgatctgggtctgcagctcccgtccgatgtccgaatccgccaccttctggggctcgggcagcgactcgaggatctcggtcttggagagaatatcatcgtcccgggtgacacaatcctcccggctcttgaacggctcatgggagatgagcttgaggccatgggcattgtaaaccagcgtatatccggcaatgccggtggttttctggtaggcacggctgaagccgccgtcgatgatgagcatcttgccgccgccatggatgggactttcgccatccttgatcttcaccggcatgtgtccgttgatgatgtgggcatgctccccttccaggccgaattcccgcaggatgcggtcgcagacagccgggtcggcggtgtggcggtaataggcgtttttcggctcagtgtgggcggatttgtcctcgatgaggcagcgctcaaaggtggtcatgcggtcacgcccgaacagcggagactttttgccgcaccacatgtaccacatcagatccaccgccttgcgctgatcctccccgccctttttgcggttgacccaggcgaaccgggacttctggtcaagaatgtccatcaggtcccgtccggcatacatttttccgtcaatcgccagttccgcaaagctgccgtcctcgttcatgggcagacagccgtggtaaagcaggttctcattgaagcacaggtacatcgatcccacccggtagaggaactccatgtgttcctggaggcgtggcgaatgggcaaaggaagttcgcagctcgctgacaatctcctgttcctcatcggtgaggcggtagggatcgttcttatccacagtggggaagtcgcagtcctccagggcataggtcacaccgccgatggtaatggaacggttctggtagtcgatcttatccagcagcagccggtcctccatacagaaagacggattgcgcataatggcctgcccttccagcttgaactggatcatcagcacggccttgtagagccgggcaatgctgtcggtgcccgagatctcccggtccatggcggagatcaccttgggggcgaagcagccgccgtcggcataggttttctgggcaaagttggtgagatggcgcaggctgatgccatacccccgctcgagcatctccatattggaatacttgacgctgatgcccaggatattgaagatgcacgcctcgctgccgcaggcggcgcccatccagagcatatcgtggttgccccactggatatccacactgtggtgatgcatgagcatatccatgatgtggtcgggccgggggccacggtcaaacacatcgccgatgatgtgcagacggtccactgccagccgcttgatcacaccggcaatggcagtgatgaaggcatccgcccggttgatctcgatgatggaggtgatgatgcggttgtagtagttctccttgttcttcacgccgggatcggtgttgagcagctcatcgatgatgtaggcaaagtccgccggcagcgccttacggaccttggaacgggtgtatttggaggccaccacccggcagatctccgaaagacgccgcagggttacccggtaccagtcgcccaggtcgccggtcatgtgtgccttgatgtattccagcttgtgctcggggtagtagatgagggttgccagttccgcccgttccccggcggtgagggtatcgccatagacggcgtcaatcttatcccggacaacgccggagcagttgttgaggatatgggcaaaggcctcgtcctcgccgtggatgtcgctcatgaaatgctcggtgcccttgggcagcgccagaatggcctccaggttgatcagctcggtgctgacctcctggacggtgcggaatttctgggagagcagccgcaggtaccggtcactgtaatcaaaatgttccattgctgtggaaaatgcccccttttcagatgcgatgcgccgtctttttccgaaagacggcaggataacaaaagaaaccctgtccggcccgggaacatgccgtcccctcccggacagtatcagatcatacacgcgtcggttttcaaaaccggtgaggacattatagcacatcaacgggcgaaagtctttggctttttgtaaacaatgccggatttttcctattctggatgctggtttttctccagaggaagggggcactctccctctccgcatagaaaaacagacggcagaacctgaagtcctgccgtctgtgatcggttggattgatggcgcagtgcgcttttttattgcggggtttccccgtgttttaccaggtcggagaacttcacagcggtgagcttctccttgacctcctccgaaatctccccatagataccacggaacacacagttacagtccccatcgccgcagcagctctgaccgcagtcatagtcctgacgcagacagcggctcagggcaaagggaccttccactgtttcgatcacatcattgagggtgatctcctccagcggacgggcaatctcatagccgccctgggttcccttataggacttgataatgccggctgaaaccagtttgcgcaggattttcagggaaaaacgcagcgtcacacccgtttcatccgaaatgcttttggcgtccatacgctgaccgttcttagccagacagtggacgatgcgcacggcgtaatccgcctccaaggtgatatgcattctgatcctcccagacaaaaagtatactataatagtgcgttattctgtacccagtatacgcttccgggccggatttgtcaagaaagacccggttaaaatcagtccaggaaatccttgagcttcttggaacggctggggtgacgcagcttgcgcagggccttggcctcgatctgacggatacgctcccgggttacattgaattccttgcccacttcctccagggtacggctgcggccgtcctccagaccaaagcgcaggcgcagaaccttttcctccctgggagtcagggtcttgagcacttcgcccagctgctccttgagcagggtatggctggctgcatcagccggagccggagcgtcatcatcggggataaagtcgcccagatggctgtcctcctcctcaccgatgggggtttccagcgataccggctcctgagccacccgcatgatctcacgcaccttgtccaccggcatatccagggcagcggcgatctcctctgccgtcggatcgtgtccgttctggtgcaggagctggctgctcaccttcttgaccttgttgatggtctccaccatgtgtaccgggatacggatggtacgggcctggtccgcaatggcacgggtgatggcctgccgaatccaccaggtggcataggtggagaacttgaagcccttggtgtggtcgaacttctctacggccttgatcaggcccaggttgccctcctggatcagatccaggaactgcatgccacggcccacataccgcttggcaatgctgacgaccagacgcaggttggcctctgccagccgcttcttggcgtaggcatcgccctctgccatgcgctgggccagttccacttcctcatccgaggagagcagcggcacccgtccgatctccttcaggtagacctttaccgggtcatcgatgttgacgccgtccacaaaggagaggtccagggcatcttcgctgtcctcgccttccagatccagcttatccagatcgtcatccagggaagcgccttcttctacgatctcgatgttctggccttccagcatgctgtacagcttgtcgacctgttccacatcgtaatccagttcttccagcgcatcggtgatgtccttggtggacagctttcccttggccttgccgctttcgatcagcgaactgatcacattcttcttatcggtcgatgccatgcacaaccactccttttatcctcttttattttctgcgatctttttgatgtagtcatcgagcttgtccggagacatctgcgatacttcctcactgctcttcttcatccggctggactggatgcggcggatgtaatcctccacctgttcccggtcaaaccggaggctgtcgttgtcggcaatgagccaggagagccgggtcatcagcgcctcgtccaatacctcggaaaaggcggtgagggacaccggacggttctcctccagccgacggcacagctcggcaaatatcgtgcggttcgaatcggtgacaaagtcctccggtccaatccgctcccggataaacccgtagaaatcattgtttttgagcagcgccgcaatgagcttgtcctccgccagtgccgcactcatattccgggcacgctgggggtccttgcggttgatctccacctcctggggggcaggacggagatcggcggtctgctgcttcttctgctcggcggtacgttttttccgccactggctctgcacctgctgccggaacgcctcagcggaaacccccagttccccggcccagcggctgatgtaaatatcccgctccaccgggttgggcagcccggcgatgaggttcgccagctcgcccaggaaccgcaccttgccctcatcggtggtgaggtcgtgccgctcccgcagccgggcaatggcatattccgccgcgctgctgctcccgtccagcaggagcttgaagcgggtggcgccgtacttcttgatgaactcgtccgggtccttggcgccttcgatcttcagcacccgcaccttgacgccgatctcatcaaacagcgccgtagcccggcgggtggccttctgtccggcctcgtccgagtcgtaggccaggatcacctcatcggtgtaatgggcgatgagccgggcctgttcgggggtgagcgccgtacccagggtggcgacggcgttgtcaaaccccgcctggtgcatggacaccgtatccatgtacccctcacagaggatcaggcgcttgtcggcggcattctttgcgaagttcatggcaaagaggttccggctctttttgtaggccagggtatccgacgagttgaggtacttgggccccttatccgagctgagcacccgtccgccgaagccgatgacattgccccgcaggtcgatgatgggaaagatcacccgtccccggaaggtatcgtagacgctgccgttccgccccttgatgaccagggcggcatccagcatctcctcccaggaatagcccttctgctggaggtgatcccggagggcattccagctgtccggggcatagcccagaccgaaccggatgatcatcttcttgtccatgccccggttcgccaggtattccagtccccggcggtcctcccctttcaccagacactggtggaagaaccgtgccgcttcccggttcatctccaggatgcgcatccggcgcttgccggtgcggtcctcagcggtgttctcgggcatgggcagtccggctttttccgccaggaacttcaccgcttcgatatactcgagattctcggcccgcatgatgaagctgatggcatcgccgccggctccgcagccgaagcagtagaaggactggctctcgggatagaccacaaaggaaggggtcttttccgaatggaagggacagagccctttgagattgcgtcccgcccgtttgagcaggacataggaggagatcagcgattcgatgtcacaccgctgtttgagttcctccagaaaactatccggtatcatggcgctgcctccttcctgccggatcagagctgccagaatttcgggatcagcagctcctcacacagcgatactgcataacggtcgctcatgccggagatatagtcgcaggcggcacgctcggcgccctcctgctcggcgatgcggcggtattcctcgggcatcttttccacatgggcagtgaagtgggtgtagagatacttcaccagatccctggccttgccctcctcccccttggccttggggttgcggtagactgcctcaaacatgaagctgataagccgctcataggttttctgcatctccgggctcatggtgatatcgtctgcgctgttttccacaatattcatcaccagagcggtgatccggtcggatttggtacgccccagcacatacttgatgtcaaaggggatatcctcttcggtgagcaccccggcccgaatggcgtcctcgatgtcgtggtttatgtaggcgatcttgtcggcataccgcagcacccggccctcaaaggtctgggcggacggacagccgctggaatggcaccggatggcgtcccgcacctcccaggtgaggttgagccccttgccgtcattttccaggcgttccgccacccggacactctgctcgttgtggtcgaaccccagcggacagatctcccgcagggcatattccccggcgtgaccgaagggggtatggccgatgtcatgtcccattgcggcggcctccaccaggtcctcgttgaggcccagggcccgggcgatggtccggccgatctggctgacttccagcgtatgggtcagccgggtgcggtagtggtccccctccggggagagaaagacctgggtcttgtgcttgagccgccggaaggacttggaatggatgatccggtcccggtcccgctggtactcggtacggatgggacagggttctgccggaaactgccggccccggctctcggcgctcaatgacgccatgggcgacagggtctgccgctcccgttcttccagtttttcccggatggtcatgggctttcccctcctttctgacaaaatcagctctactttatatataccggatttttctgaatctcccccttgattttttgaaaaaggggagaagtttacaaaatcccccgctgcttttacggcaaaacaccaaaagcatgggggatctgttcggatcttcggatactcacccgatcattccgggatctcgtcgaagcgatgttccagctcatagggcaccaccgtggcactggtgagctcggtgagctccttccggaacgcctcgacatacttgtccttgatgaggatctgcatgcgcactgccgccccgaagtcgctctccagcgtgacagtgtggtacttgggcaggatataggtgatcttgccgtactgcccgtagtcaatgtccatctgcagcacggtacaggggctcatcacccggggacgggctgcccggaccgcaatggcagcgccctcggtataggcacgcaccaatccgccggctcccagcagggtgccgccgaaataccgggtcaccactaccaccgcatccacaataccgctcttctgcagcacatccagcaccgggattccagcggttccctggggctcgccatcgtccgaataccggcgcacctgcccttcccgcagggcataggcatagacattgtggctggcctcccggtgctgggcacggatctcgccaataaaggcgatggcctcttcctcagtggtcaccggcttggcgtagccgatgaaccgggaccgcttttccacaaattcatcggtaccatagtccgccagggtggtatactctgcctgcatggcagttcctcctctccgacaacagaaatggagcggtgcaaaaaacgcttcttgcaccgctccgcgatcatttctattaagacgctgccgtccttctgcaaaggtgcgatcagcttacttgcccatattgaagcgcttgttgaatctgtcaacacgaccgccggaatcaaccagcttctgcttacctgtatagaacgggtggcacttggagcagacctcgactctgatctcaggcttggtggatcttgtctcaatcacttcgccgcaggcacaaatgatctttgcgtcctggtacttgggatggataccatttttcatttttgtcacctctttcgcccaccggcacaattgtaacagtagtatgttatcataaaccgccgcaaaaagcaagggcttttccggctttttacaaaaaactttttggggatttcaggcttacagtccggcggctccggtcatggcagcacgcagggcatcataccgctggaggcactcctcccggctgcctgcccgcacggtaaagtagagcttgagcttgggttcggtgcccgacggacgggctgtaaccgcacagccgtctgccagctcccaggtgagcacatccgccgagggcagaccggttgcggaggtatcccggtagtcggtgaaaccggtgaccgcagttccggcgatctccgggagatgctctgcccgcagatgatccatcacagcgcccatccgctccatggcgccggctccggcaaaggcaaagctgtccgccttggtgtaataggtgccgtactcggcatagaacccgtccatcaccgcgcagagggtcctgccctccagcttgtaatgagcagccatctcgcataccagcagggcagcgttcacggcgtccttatcccggacatgcatgccggtgaggtagccgcagctctcctcaaagcccatgaggaagcgttccggctccccggcggacacgagctgattcatcacatcgccgatgtatttgaacccggtgagtacccggcgcatctccacgccccagtgctctgccacccgggctgccatgggggtggacacaatgctcatcactgccactggattccggggcatggtgccctgggcagtgcgctgccggcagatatagtccagcagcaggacacccagctcattgccggtgaagagccgccagctgccgtctgcttcaggggcagccacaccgatgcggtcgctgtccgggtcggtggcaaaggcgatgtccgcctggatgtaccggcccagatccagagtcatcttcatggtgtcggggttctcggggttcggggagggacaggtggggaaatccccgttgagacgggactggtccgccaccacatagatctcctccaggcctgcccgggagagcgccgcaatgacgctcttgtgtccggcgccgttgaggggcgaataggcgatctttaatccactcttccggaagatgcccggctccagctgcagccggagcaccgcttcgatatagccgtcaatgaactcctgggtgaggtattcgatgctgccgttttggagcccctcctccaggctgctccggcgcacgccgtcaaaggggtccaccgaggcgatggcttcactcacccgccgggcaaactccgatacgatctgaccgccggtgtggtcatagaccttgtagccgttgtactccgggggattgtggctggcggtgatcatgatgccgctctgacagcccagttcccgcaccgcataggagagcgccggagtgggcatcagctcgggatagatccacacatgcacgccattggcagccagaatcccggctgcctcctcggcaaattcccgggagaaatggcggctgtcgtaggcgatggcaacgccgggacagtcatggtcctccagcagcacccgggccagaccctgggtggctttgcccactgtgaggcggttcatccgggcagtgccggcatccaggatgccccgcagtccggcagtgccgaattccagttccccgccgaagcactctgccagcagttccggatcagcggcgatctccgcagcccgggctgccagctccgcaccggccttgtccgggtcgagccagcgtctgtcaaattccatcttcatcgtcctttccgccggagtggtccggccctgtcttttccactgtctatcatagtatccgccccggcgggtgtcaaccgttcttttctgaattttccgcgaaatcttccgcttccctttgcctggaaaagcggtataattttcctgagaacagctcagaaagagggtattccgtcatgttttccagtgtcagcagcttcggactcaccggcatcgcctgctaccccgtcaccgtggaggcggatgtgagccgggctttcccctgttttgagattgtcggcctgcccgatgccgccgtcaaggaatccaaggaccgggtgcgctccgccatgaaaaactgcggcatggaattcccgtccagccgggtggtggtgaacctcgcccctgccgacaccaaaaagaccggcgccatctatgacctgcccatcctggtgggaatcctctgctccaccggggcgctgccgcccctgcccgagggactggccctggtgggagaactctcactggacgggcacctgcgcccggtgaacggaatcctctcgatggtggcggatgcccggcgccggggactgcccggcatcataatcccccgggccaatgccgccgagggagcggggttccccgactttccggtctatgccgccgactcggtggaggaggcactgcggcacctccggggcgaagagatcctgccgctggcctccagcctgcctgtttccgctgaacccgaagccccctgtcccgactttgcggatgtcaaggggcagccggtggcccggcgggcgacagaggtggcagctgccggcggacacaacctgctcctgctggggtcgccgggttcgggcaagagcatgatcgcccagcggctcccctccattctgcccgaactgagctttgaggaatccatcgaaaccacccagatccactccattgccggactgctgccccagggggtctcgctgctccggaaccgccccttccgggcgccccatcacaccgtttcggcggcggggctcaccggcggcggctccaatccccgtcccggcgagatcagcctggcccacaacggcgtactgttcctggacgagctgccggagttctcccggtcggcgctggaagccctgcgccagcccatggagaacagccgggtgaccatctcccgggccggcggcagtgtgacctatcccagccggatcatggcggtggcggcgatgaacccctgtccctgcggctactacggacaccccgaccgcccctgcacctgcaccccgtcggcaatcaagcgctatctgggacgggtgagcggcccgctgctcgaccgcctggacatccaggtggaggtggcgccggtgcggtatgaggatctggcctccgcctcccgggaggagggctcggctgccatccgggagcgggtggcggcggcccggaagatccagcagacccggctggccccctatggcgagagctgcaatgcccgcattcccgccggggcgctgggggaggtctgtccgctcacaccggcggcagaccggattctgcagatggcctttgaacggctgaatctgtccggacgggcctacgaccgcattctcaagatcgcccggaccattgccgatctggacggaagcgagcgcatcgacaccccgcatatcaccgaggcgatccagtaccggtccctggaccggaagtactgggccggacgatagaaaaccgcatcaaaaaacggctgtcctcccgaaacgggagcggacagccgttctttttatatatggagcagggtgcgcaccaggaagatcgccagcagatgggcgggatagtagccatagaagaaccattttggaatgcgcaggccggtacgggtacggaagaagatgagcggcagtgccagcagagcaaagaactcaaagctgatccacagcggccccagatggcaggccagggggtcttccggagagccgccccacagcgccggcaggtagctgagggcatagagcagcgcgcccagggctggcttctggcggcagaggtagaagatcagcatgagcatcacgccggtgaccgagtagtcgaagttcacaaaggcgagcagcagcacgcagcccagaaagagcggccagttgtgctccttgaagccccacattgccagcagcgaaacgaacagtgtgaagaagatattgaagttcagcagattgcccaggaagtcatcggcattgaaggcgagaatccagaacggctgggaaaggagcgcaaacactcccagccgggcaagatagcggcggatgtcatgggtgtagagcagacccactgtcatacagtagcagaagagcgggaaggccatgcgtccgatccagcggaacaccggatactccgggaaaaagaccgctcccacatggtccactgtcatggacagcactgcgatgagcttgagaaagtcagtatccagattggttcggagcttgggttggtttttcagccgtaccatgatagaaatcctcctgtttccatggaaaattgcaaaataaaaaccgaactgccctctccaatggcacttcggtccttatttcggccagaccagccggtcacattctggaatagaactccagtgtcttctgataggcttcgatgcccgcttccgcgtcgccggactgggctaccgaacggatacagtcattcaccttggaattgagcagcatctgtcccacccggtgcgctgcctgttttacagcgttgatctggataatgatctcttcctcgggggctccttcagataccattttctcaatccctgccacctgtcccgaaatccggtgcagccggctgataatggctctctgttccttttctgtcacgaccttttcacctcctggattcacaaatccatattactggattaagtccattataacaggttgccgctccttgtcaacggcagccgttatttatgatacttctgaccccgggaaatggtcatcgcccgatagagctgttccagtaccatcacccgtgccagctggtgcgggaaggtcatccgggacatggacatccgcaggtcgcccttcttcttgagctcctcccacagtccgtaagaaccgccgatgagcagcacaatggaactcttcccgtccactgccgcacggtccagggtctgggaaaactcctccgagctgatctgtttgccctcgatgcacagcgggatcagatagctgcccgccgggatcttggcaaggatctcctttccctcggcctcgatccccgcctggatctgcgcttcggacgggttctggggcagacggtactcgtccacctccaccacccgcagacggcagtaggcacccagccgcttttcatactcggcacaggcatcggtgaggtaccgctccttgagcttgcccaccgcaatcagcgtcacattcagcatgggtctccccctcccttaaaaaatcatcatcggccccggttcggtgcggggcgccacactcagcaggtagtccccgccctctgccataccagccagggtcagttcactgcgcaccgtttcccgggccagttccgggtgattgttctccttgctcagatgccccagcaccagacgggtggtgccgctgtccaccagggtccgggcctccagcgcgctggagtcgttggacaggtgtccgctgtccgacgcaatgcgccgcttgagcggatagggataggggccgcaccggagcatggcctcatcataattggattccagcagcaccagatcgctgccgtggatggcctgatgcacctcatcgctcacatagcccaggtcggtggctaccgagatcctgcgcccatcgggcaggttcaccgcatagccgaagctggacagcgaatcgtggctggtggcaaagggccggatctccatatccccggccgcaatcaccgtggaggcggagatctcctgaaccggcccggtggacggcagttcgccccggtctgccagccattccagagtctcccgggaggcaaacagcggaatggcgtattttttcagcagcacccgcacgcccttgatatggtcgatgtgctcatgggtgaggaacagcccccggatggtatccggacggatgtcccgggcggacagggcggtgagcagcgccttgcaggatacaccggcatccaccagaataccgccggtcccggtgccgatataggtgctgttcccggaagaaccgctgtaaagagtacagaatcttgccactgtggtaaacaatcctctcttccaaaatcaatcaaaaagcgatccggcattccacacagaagccggatcgctctgttttcagtcagacaaatcaggacagcgcccgctctgtttcgttgtccgagcaggtcaccttgcggatatccgcacccagccggttgagcttttccaccagatcggaatagccgcgctcaatgtgatggatgtcctccacttcggtgcagccatctgccatcagaccggcaatgagcatggcagcgcctgcccggagatccagcgcacgcaccggcgcaccggtgagctgctctactccctcgatgaccgcaaccttgccgtccacctgaatattggcgcccatcttgcgcagctcgtccacatacttgaagcggttgtcccagacaccttcggagatgatgctggtgccgccggcgcagcagagcatggtagccatctgaggctgcatatcggtggggaagccgggatggggcatggtcttgacattcaccggcaggatcgggccagtacggcgcacccggatggagtcgtcaaactcctccacctcagcgcccgccttgcggagcttgtcggtgatggattccagatgcttggggatcacattctggatcagcacatcgccgccggtggcagcagctgctaccatataggtaccggcttcgatctgatcgggaatgatggaatagttggtgccgtgcatcacatccacgccgtggatcttgatgacatcggtgccggcgccgcggatatccgcgcccatggagttgaggaagtttgccagatccacgatatgcggctccttggcaacattttccatgatggtgacacccttggccttgaccgctgccagcatcacattgatggtagcgcccaccgataccacatcaaagtagatgtgctcgccccggagctccttgctgtccatggtcaccatgccatagttcaccgatacatcggcgcccagggccttgaagcccttgatatgctggtcaatgggacgcacaccgccgaagttgcagccgccgggcagcgatacatcggcccgtccgcagcggcccagcagcgagcccaggaaataataggaggcacgcaggggctttgccagctcatgggaaaccaccggttccccgatgtgggtggtatcgatctccacagtggtcttgtccagcaggcgcaccttggcgcccagatcccgcaggatattgagaagcgcggtgacatcgctgatattggggatattttcaatgacacagacatcccgtgccagaacagtagccggaatgatcgccaccaccgcattctttgcgccgctgatcgtgacctcacccttgaggactgcgcctccggtaactacatacttttccattcccattctctcctgtattgtatagtactcgtattctattatccatctgctgtgggctgttcattccctgccccagcggaaaaccaccagaattttctcttcggcccggactaaaactgcctgaccttgtctgagcggttcagcgggcgcagactaccatgcccggctcacctgccaggcagaaaatccgcacctgttctgttttgtatcgcctgccgtccacaggcgttcctccattccgggcaggggcatcactcggttccccggctccggaaccctctggttctgcactgcctcctgcacctgtcccaggcagacgcaggatctttcggcagtctttctgaggctattataccattgaccgtacaaaaataaaatagcttttttggcaaaacagcgccgtcccatcggaaaactcccggtttttccgggctgtccggttatttttccttcttttggtattcccgccacagttcttccaccgtccggggcgcttccggctcgggaatatcctcttccggctcctccggaacagccggctccgcttccgccagggcctccggttccggctcctgttccggctccggcagcggctggggctcggctgcttcggcggcagcctcctcttccctctggcgctgagcatggctcaggaaccaccgccgggccagcacagtcaccgccgcagtggacggcaccgtgagcagaatgccgatgcttcccgccaccgactggagcagttccaccgcgatggtctcccggttgatgatggagccgatgtcgttattgtaggccagcagcagcaggatcatgtgcagcgagctgcccacataggccagtaccagggtgtttgccatggtgcccatgatgtcccgtccgatgttgagtcccgagcgcatcagctcccagtcccggatatccggcttatggtagaggatctcatccagggaggaggcaatggacatggctacatccatggtggcgcccagcgcgccgatgacaatggcggcaaagatcacaccccggaggtcgatgaccgtatcggcgttgatgtacatgacaaagctggaatcctcatcgatgaggccggtgatgaacagggcgtcctgcatggcgatggtgagcaggccggcaaagcccacaccgcaggtacagcccaccgccgcggcgatactcttggggtggacgccgatgacgatgcacagggtcatcacgatggtgaacaccgctgtgatgaaggtgaccagatagatattgtaccccttgatgatggcggggatcatcacaaagaatacggcggcacaggtgagcaccagcgataccaccgtattgaagcccttgaagcgtccgaagccgatgagcagcgcaaagaaggccagcaccaggaagagcatgggcatctcccggaggtggtcgacaatgaaccagtcggcattcatctgcgagtcaaagttgaaccccgcgaacacctgatcccccacctcataggggaaggtcttatagccctccttgggggtctggagctgctgatggactgtcacttcctcgccccggagcgccccttcccgcagccggatggtgatgtcctgttcgatataggactcactccagccgtcgtaggtattttcgatctgctggggttcccccacagcgatgacctccgcccggtaataggtgtccgcccggctgctctggaaataggagttatcctgtacagcaatgcggttgcccacatataaaaagagtaccgacagaatcatcaccacaaaatagagaatcctgtccctgttcaaaaaacgctttttcatagattgtcctcaatgcatgggaatccccgggctgttccccgggggaaaacttcgcttggcgggcagaatcgcccgctcccggctattctatcatgttccggctggaaataacagaccagaactgtgaaaacctgccgtccccgcaaaaaaggacagtaccgtccgttcgggctgtactgtcctttctgtggtctgttactgttcgtccttgcgggaaccgcagccgcctgccatcgggcagtgcatacagttgccgccgcagccggagctgccttcggtgccgtcggaattcttatagacacggtagagcgcatagaaaaagcccacacatactaccgccagaagaatgacattctgcatgatctgatgcctccgtaattctgataattccactcagaagcccagcagcattcccacctggtagaccaggaacgcagccacccaggccacactggtctggaaggccatcgccgcagcggcgccccgcaggctgcccagttcccggcgcactgctgccatagctgccacacagggcatatacagcagagtgaataccaggaagctcactgccgccagcggagtaaagagctgggacagtaccggcaccagcatggcaggttcgcccacattcatcagcacagccagggtgctgacaacggtttcctttgccatcaggccggtgatgagagcggtggcggcacgccagtcgccgaagcccagcggcgcaaataccggggcgatcacctgaccgatggcagccaggatgctgtccgagctgtcggtaacgatggaaagatgcgtactgaagttctgaagtacccatacaattatagtcgccacaaagatgattgtaaatgcctttaccacaaagtccttggctttttcccacatgtggcgcagcacattctgggccgagggcagacggtaagcaggcagttccatgacaaagggaatggggttgcccttgaagatggtgcccttgaggagcagtcccaccaggattgccaccaccataccggtgacatagagtgccatcatcaccagcgcgccgtgctccgggaagaaagcagcggtaaagacgctgtaaatgggcagcttggcggaacaggacatgaagggggtgagcaggatggtcatcttgcggtcccgctcactggagagggtacgggaagccatgattgccgggacactgcatccgaagccgatgaccatgggcacaaaggagcgcccggacaggccgatcttccggagcagcttatccatgacaaaggccacacgggccatatagccgctgtcctcgagaatggagaggaagaagaacagcgtcacaatggtgggcatgaagcccagcacactgcccacgccggcaaagatgccgtcgatgatgagggcatggagcatgggagccacatccagccgggtcagggcttcatcagccaggttggtcaccaggctgatgcccgcggcaaacatgtcactgagggtggaccccaccacgccgaaggtgagccagaacaccagcagcatgatgcccaggaagatcgggatggcaaataccttgtgggtgaggatgcggtcgatctgtaccgaccgcagctgttcagcggtatcgccgggcttgtgaaccgctccggcgcagatctgctcaatgtagctgtaccgcatatccgccagggcagcctcccggtcggtgccgagggccgcctccatctcatctgccacatgctggacaatctcccgttcattctggttgatctccagtttgtccatcatcgcctcgtcgccctccaccagcttggtggcggcgaaccgcagcgggatcttcttttcctcggcatggtcctcgatcatgtgcgccagcgagtggatcgcccgatgtacctcgcctttgcagaagtcatggtgcttggggcgttcgttgttctggaccgtgcgcagggccacagtcaccagttcggcgacaccctcattcttggaggcggagatgggcaccaccggcacacccagtccggcggaaatcttctggatgtcgatgctgccgccgctgcccgctacctcgtccatcatgttgagcgccactaccatgggcatctccagctccagcagctgcagggtcaggtagaggttgcgctcgatgttggtggcgtccacaatgttgatgatgccgtccggctcgccgcccagcaggtaatcccgggtgacgatctcctccatggtatagggggagatggaatagatacccggcagatccactaccacagcgccgccggaattcttgatggtgccttccttcttatccacggtgacgcccggaaagttgcccacatgctggttgctgccggtgagctggttgaagagggtggtcttgccgcagttctggtttccgatcagagcaaatgtcatggcagttcccctcactttccgctctcactgagcttttctacggtgatcttggcagcgtcctctttgcgcagggtcagttcatacccccggatgcggatctcaatgggatcgcccagcggtgccatcttgcgcaccatcagctttgtcttgggggtgatgcccatatccagcagacgccggcgcagaatgccttccccgcccactgcggttaccacagcactttcgccgatcttcagttcactcagtgtcatattctatcccgcctcgcaatttagtcttagctaacttatcttacaaaaaaatccggctctgttgccattctatgtgtcccgggcccggtaaaagacccggagccatacaacttagcctcaactaacattttatccaccccctatccggctgtcaagacagggcaggaggatttttacatatttcgtcagaaacacaaacccggcagtctgcgggaacgggattttgtgcagtcggctgccggagtgcagaaaggcgtccttcttccggagaagaaggacgcctgattggattctgtgaaggacagggtcacacgccgcctgaaaggccgcagccctgtgccggagggatcaatagtaggaaacagtgacctgcttgcccattttccggaggatctccgccagttcatcgatcagtcccatcttgatgacaatgctgatgggcaggtcgggattctgatgggcgggattgatggcccgtcccacaatgaaccggatgtcggtggcctcctcaaagagcagctgggcaatccgggaggcaccgtcctttttgccggcccaggcggtggagagatcctcgttctccaggtagcccttggcgagcttgagcacatgaccgatggtgatgaccccttcggtcaccagatcgatgccctggatcttcgccgtgggcgggatctcggggtcaaagtactcgatggtgggaatcaggggcttatccagcacccgggccaccagattcgaggtggtgccgccgcagacaatggtcttgccgccgccgtcaagcagctcctccaccgccttctggtcgtcctcggggtgttccggcgggccgatcatcaggctcaccgtctgccggggccggatgcggatggctgccacagtggtatcgtctcccggggcatggtcatagagccggtcgcactcctcggctatgatggtacaggccatcttcgccgagagatccggttcgtaccgggcctccagatagtcgatgatgttgtcccgctgccagccgtagttgtacatcttgcccacgccggcatagagggcgccgtcactcatggtgaggaagatatcgttgggcttgaccttcaccacgctcttgatgaccttcttgccgtcgatgaccagctcctcctggggatagtggatggatacgccgccccggagcaggatcaccgaggggttatcgaactggagcagggtcatctcgtcctgatggttcacctgcatgacggtgaaggtggaataggccaccttacgcaccttgcagatgggcagggtacgggtaacggtgcgcacgcactcctccaccggcatgccgcttgccatcatggtggcgatgatcttggaggtcagcgtcgagaggatattcgccttgacgccgctgcccaggccgtctgccagtaccagggtggtgctgtcctcgaaccgcacggtttccacccggtcgccgcagagttcctctccctttttgatgaggctcacatagcccacttctgctgtgaggccgttcatcgcttcacctccccgcccggttcaatggtatccttcagccgggtcagggcaatcttggtctccgctgtggtctcgcccagcagcgaggcgatctcctgtgccacccgcatctgcttttcgatcacacggtccgccagttctgctgtccggcggcgttccttgtccagttcctgttcccggcgggtctcgtcggtgatgtccttgataatgctgatcaccaggttgtattccgggtcaaaggcgatggtctcctccacatacttgtcatactcgggcaggtagtggcggatggggccgtccggacgctcgccgtcaatggcctggagatattccaccgtgcccagaatggcatcgatgggcatgcccaccatctcccgggggctctccataccgaacagccgggctgccgactcgttggcctgctggatgatcagcttggtatccattgccatgatggcgttgggggtgttgtccagaatggcgcccgagaagctctccgccctcgccttgaggaagggcaggcacatggtcaggtcggccttgccctggcagaccgcaatggccttttcccggcaggtgctgtatccgcaggtaccgcagttgagctcgtcctcgggacggtacttgcccagcttgtgcagcacctcctggatggcggcctcgccgggcttcaccgcgcccgaaccgatgtactgcatcgacttgcgcagatcgtctgccggctggtcgtcaaagtcccggccgctcttgccgctgtactgttccacccgggtcttgcaggtgatgggcgcgctgtggtaccggtgcatgaccgggccgccgatgcagctgccctcgcaggcattcatctccacaaagcagttctgcatgccgccccgctcgatctcctccagggcgtccatgcaccggcgcaggccgtcgatggggatatagctgaacccatcgtccagatccatcgaccggataatgcctcccgctgtggggaagaaccggctccgggcctcggtgccgtcgggctgttctccggcgggcagttcgatgccctcctctgccagccagtcgatgagctcatcaaaggtgagcacacagtccacctgaccgtactgctccgcctcgtccttcttggagatgcaggggccgatgaataccacggcgctgcccggtacccgctccttgatgctcttggcatgggcgagcatgggggaatccacctttgccagatagggcagagcctggggatagcgcttctggatcagcaggttgacgctgtggcagcaggaggagatgatgagcttgtgttctcccgaggcgatcatgcgctcatactcagtcttgacgatcctggcgccccgggcagtctcctccacatcggcaaagcccagtttgagaagcgcctgacgcatgccgtccagaccgcccacgccgaagtcggcaataaaggagggcgccaggctgacgatcaccggacggcccgaggcgatcagagccttggccttatcggtatcccggcggatctccttggcgctctgggggcaggtgacatagcagtgtccgcagtagacacactcccgctcgacaatctgtgcccggttttcggaaaaccggatggatttcagcgcgcattcccggatgcatttataacagcttttacaatcctcttttttgaggagcagcagttcactcatctctcagctctcccagtatctcggtttcaaatttttcatcgaagttttccgcattcacgccggtgaccgtcttttccccgacccggacacagacgccatcggtgcagtttcccatacagaacgatccccggatgttcacccggtcctccagatgctcccggcggatgcgttcctccatcttttcgatcaccgaccgggaccctttgagatggcaggaactgccgatgcagatgtaaatatccatggttctatccctccgcctgaatcgttacagaattaacaaggttagtataccgcaaaaaacacccggacgcaagcggttcactccccgctgatccagacgaaccggggccgggtctgtccgtcccgggtgactgtttccagccacatggaggccggacgcacccagtatccccgctcgccgtagagcgcctgatagaccacatattcctcgccggtttcgctgtgccgggccaggcccagcacctggtattcgccgcccttgaaatgccgccagcgtcccggatggatcacctcggcggcagtgagtgcccggcggaagatgcccaccccagccggacagccggggtattcctcggtgccggagagcacaaagcccaggctctcctgcacccggaccgaaggggtgttgtccaggctcacatagttgaccatctcccgggcgcccagcagatccgccgccatggaaaaggagcgggtcagcagttcccgggcatagcccttattccagaagggccgccccagatagagggtctgctcacaggctgccggcccgtaccgccgcagcaccagcacgccggcaaaggcgccgctctccccctccagcaccgcaaagggcagccggtcggggtcgtccagatagccctgcaccagccgggccgcctcctcccgggtgcgctgcaccccgcagtagagctgtccgccgatggcctcgtccgacaccagctcccagaccgcgtcggtatcctccatgcccagcggacgcagccgcaggcgttcggttgtatactgcatcacaggtcgatctccagtcccaccgggcagtggtcactgccgaatacatcggtgtagatttttgccccggtgatcttttccccggcgtcctccgacaccaggaagtagtcgatgcgccacccggcattcttttcccgggccttgaaccggtagctccaccaactgtaaatcccctcggcatcgggatagagcttgcggaagctgtccacaaagccgctgtccagcagctcggtcatcttctggcgctcctccggggtgaagccggcgttcttggtattggtcttggggttcttcaggtcgatctccttgtgcgccacattgaggtcgccgcagacgatcaccggtttctgggccttgagctgtccaagatagtcccggaacacatcctcccactggcagcggtagtccagccgggccagctccgcctgggagttgggggtgtagacagtcaccaaccagaactccggatactccagggtgatgacccggccctccttgtcatgctcctcgatgcccaggccgtaccgcaccgaaaccggctcccgcttggcaaagacagcggtgcccgaatagcccttgcgctcggcactgttccagtactgatgatagccgggggtatccacttcggcctgaccgggctgcatcttggtttcctggatgcagaaaaagtccgcgtcctcctgccggaagaagtccagaaatcccttgtccagacaggcccggatgccattgacattccatgagatcagcttcatatccttcacgctcctgttccggggaaaattcccctggagattgtaatagtccgcgccgggcagtcccggcggcattctgccctcattatacactattgccaaccgacttgaacaggggcagaatggttcttttttccccggaatacagcggttcttttcgtcaaaacaagtgacaaaaccggaaaaccatgctaatataatgaatattacgaaacttttttgccttttggaggaatcatcatgcagaaatttctgaccggtgcgctggctgctgtttccaccgccgcactgtccgtatccaccgctctggccagtccggccgccaccctgctgcgcacggaatatgagcgtcagcagcaggctctgccgctgtttgagcgggaccatctcattgcagaacccggccttctggtcattgccattcttctggcgatctatctggtctggaagctgcgccgggatatgcgcaagcgggacgaggcagaccgtcagtaccgggagatgatcgcggaagctgaacggctccaggcagaggaagatgaggccaaggctgctgccgaagccaatgctgccctggaagctgccgcagaggccgcagctgaggaaacttccccggaggttgccgctgaaaccgtggagctggcggaggaaaccgaagccgaactggaagcagcccagcctgaggaagatccggaaaagaccgatcgctgaccctgcacacaaaaaagagcccttcccgatgggagggctcttttcttttgggctgcgatccagttgtgatgaagggcttacagcgcgggaggaaaactcccgcccgcctgttccctccagcggtccagcagatcctgcagggtgatctcccgcatcttttttcgcatggcagtgaagatctcatcatagggctcctggagcaccgagcgaatccggctccccaccggacactggggggagggattggggtgtatgcccagaagctcatgtttttcgtccgattccagggctgcatacacatcccacaccgtgatctcctccggactgcggagcaggactgcgccgccggttccccgggccaccgacagaatccctgccttctgcagggcgccgaacagattgcggatcaccaccggattgctgccggtgctggctgccagtccggtgctggtcatccgccgcccgtcaaataccgcaatgcagatcagacagtgcagcgcaatggaacatttggtactgatgcgcatggtgtttcacctctgattacaagataccatcttatcggaaatttgtaaactgttttgatgtaaccattgacattacattcagcctgt

SEQ ID NO: 4618 - DNA, 4368 bp, Unknown
  16S sequences of unknown bacteria
tcttgtcccggactttgcgcgcgatatagggtataaaaggatataaaaagggattatttcgcttccgcctccccgctcggcgtttcgtcgtctttcgccttccgcgccgcggcgaaaaggagcatttcctccatctgtttcatgcattcgcccaaaaggaaacgctttgaaaagctgcggtaattttgcaggcatttttgtttttcctcttcgttttccagccaatagtcgatggcgtccgcaagcgcctgcgggtcgtcgtagggaaagaggtttttaggcgtcaaggcaaaataacgggtggcgctgcgcggcgaatcggcgatgacgggcaacagcccgccgcagatggcttcgaggcacgccaccgcttcgatttccacctccgccgtatgcacgtacagatcggcatagccgatgatctcggtcagttcgtcgcgcttaaaaaacttaaagaggggcggattgaaaagctctgccgcctgttttttaagcttttccttcaaaggaccgtcccccgcgaggacgagctgtatcttccgtttgtgccgcgagagcgtcgcggcttcgaggaggatgtgctgcgctttttcctgggaatatctccccgaacagaggatgacgtatttatccttaaacgcttcgggcttgtccgtcttttgcagctcgcagaaaaggggatcgacgccgttggaaatcacaaagccgttggtgggacccgtagaattttcaaagacgttgcgaatgaattgcgtgggataatgcacacagtcgcaatgccgatagacggcgcggtagaaattgcggtatacctgttcgttaaaccactgattattcatcattttcaggtgattggaaaggttttccgcctgacagtgaaagctcgccgtgacgggaatatccaattccttggctattttcagcgccgcgcgggcaaggataaagggaatgagcagatgcaccacgtccgcgttctcgatcgccgcgcgcaggactttcttttgcggctttcccagcgtcacgccgttcttctccacgtagccgttgaggaacaggaagttgattttcggaacgcgcacctctccttccagcaacggcacgtccgattcgggacaaacgatagtaagagcatgaccctgtttttttaaaaaacggatcagattcatagcggcgaccacggtgccgttattttctttcaggggaacgtcgcagacgatagttatgttcatttaaaattccttattcccttcacttttgctgtttatcattataagcgtttttcctgtttttgtcaagaaaacccgtaacggtttttcacaagtcttgacaaaagggcggaaacgcgctataatgacggtatacccaaaataagaaatttcccgaaaaacggggaattttgtctaaggagagaagaatgagcatccagcgtcccgtattccactttgcacccgaaaaaaattggatgaacgatccgaacggtacgctgtatcgcgacgggatctatcatctgttttatcagtataatccccgcggcgccgaatggggaaacatctgttgggcgcacgcggtgagcgcggatctcgtcaattgggaaagaaaaggcgtcgcgctctctcccgaaacgcaaaacggggagcgttggtgcttttccggctgcgccgtggaaacgggggacgggaataaaattttctatacctcgatcggcttcgaggaggaagcggtgcggtttcatgcctcacaggtcatttgcgaggcaaattgggatttttccgtcattcgtcgcagcggacatcgcctgaaagcggggattcatcccttccccgtcacggaatggcgggatccgttcgtcttttcctttcgcggcgcgcagtatatggcgctggcgggaatcgcggagaaagcgagcgtctttctctataaggcgtcggacgcttccctcaacgagtgggaatataaaggcgtattgttctcggtggatcaggatttcgtggaatgtcccaatgtggcggtgttcggagataagatcgttctcttatacaccctcatggaagattgccgcgtccattatgcggcgggcgcctttgacggggaacgccttgccgtcgaatccgaaggggtgatcgacagcggaaacaattgtttttacgcgtccaatctctcccgcacgaaagacggcggctacgcgctttacggctggcttcgggaaagcctcggcggactttctccctgcgccggatacagcggctgtctggcgcttccccggactctcgattttgtcgagggcagagttctgacgtttcccgtaaaggaatttgagaagcttgaaaagggagtgctgttttcgagtacggaggcgcgcggcgtcgaatgccgcgcaaagacggcgacggcgcgcatccgcttttcgtcgtcggaagacgtggaatttgaacttttgaaaaacgaaaaggaaagggtacgggcgactcttgcggacggaaaattaaaggtggagcggttcacttctttgtcggaggcggattcgagaactctctttgccgcggtggacggggacgaatttttcttcgacgtctttatagacggcacggcggtggagatattcgtgggcggaagcgccgcgttgagttttcgtttttatacgaaggcggagcacgacacgctttttgccctgcggcggggcagcgtacgcaacttaaaaatttccgaactctctcccgcggagattcgcggagagtaaacgctttgagagagcgcgcagggcagggctgcgtctatcgaataaaaacggataaattttgcaaaaaagtcgaaaattgtcggatacgatattgacaaaacttcgaaaatgagatataataacggaaagcggttttctatgtgctttccgatggaggagggaacgtctgcaagaagatgattacgaaaattatttctacgatggcggttctcctggaactgatcgtcatattggtgattcgttcgaggcgggataaaacgggaagcgtgcgtttggaaaaatcgggggaggggcgtttcgtcgtcctgctcgctcccatttcgagatggatcgcctatacggcttacgccgtgggagggatcgtctgcctttgcgcggcgctggaaaagactcggggagatattctctacggcttcgccttggggagcgtttttctttgtgccgccacctattgggtcgtcagatgtttccgctggaaggtggaactttccggggaaaggatttattgccgcggaacattgggcagagccaaagttttttcgtggagcgaagttcgtaccgctaaaatgcagttcgaatacgtgcgcgtgtgcggagaggtcatggtgcagttcgacgatacgaagggcagatccgttcgtttccccatccccgcgctgtatgcggacgaagtgggggcgctgatcaaaagccacccgaaagtgatcttcaactccacgcagaataagtcttccatgaattttaaaatttagtcgccgcggggatacggcatatacggcagggaaaaaacgaaagggcgctcggttctttcgggttaggagagatatagaaaagagatgaaagaagacaaaagaatcgtaaagacaaaaagagaactcaaaagaaccttggcagagctgttaagggaaaagcctttcgagcagataagcgtaaaagagatctgcgatcgctcttccaccagccgtatcactttttacacccattataaggacaaatgcgatctgttgaacgacctttttaaggatttcagcgatcgggtacgggagtcgtgcggggaaatggactgcggcgaccctaaaaacgggttgacggcatttttgaaaaagctgctgcacggcgtcgtggaatgcgtgcaagagaatagctttttgatcagggaaatcgacgcggaaaagaattcgtatctgacgtttgctttcaaatgctacataagcgaggcgatcgaaagcgcgcttcggctgctcacccaaaagttccgatgcagatataagtcggaagaggcgtttgccttcgtgcggggaggattcgtttccctctgcgtctatgcggtcggcgcccattgttcccaaaccgctttggaaaagaagatggtgaagctgatgcaggacgtggtggagtcaaatatcctgttcgtccacgaataaggcgttgcgcaaaaagtgacaggcgggctttccgagcgccgaaaagaaggcgggagcgcggttcgttttttaaatcttccccgcgggttatccatcgataacccgcgggtcgttttctcccctctatcgtcaagggcgagggaaagggcgctttcctttatcgccctcggctaaaaggagcgtctgagcgcataaataaatccccga

SEQ ID NO: 4619 - DNA, 12794 bp, Unknown
  16S sequences of unknown bacteria
gaaccggcgacctgctgattacgaatcagctgctctaccaactgagccacagtagcaaataaattttcaacgctaatagattatagcagaagggcatggaactgtccagcccttctgctctagatttttatacattcaagaattttttctgccgcgcaaatacatatacagattgcatttgacattgccattgtacagcttgcgctttttatctgcccttcgcccgaaatccctttcaaacgcttcatcggatgagatggcaaaaatgcccatacgggaatgctcggctttgagctttcccaacgcccgggctacatgctgtccctgtgttctttccattctaaggccatagggcggatttgtgacaatcaacgactgctcagccggcagctttagattggccacatctccacaggcaaaattgatatatccattgactcccgctctttttgcatgccggtaagccatggacaccgccttgtcgtcaatgtcgctggccaacagatgggcaaatcccttttcccttttctgtgccatggcctcttccctttgcctcgccgcctcctgtgcccaatttttccatccatcaaaggcaaacgtccgctgcaagccaggcgctatgcgggccgccaacatcgccgcttcaatgacaattgtacccgatccgcagcagggatcgaccaatgtttctcgcccatcgtaatacgatagcatggccaacgcggcgcccagcgtttcccgtaaaggcgcctgggcggaaagatcgcggtatcctcttcggttcaatccagggccgcttgtattcatcgcaatggtcgcttcatcccgcaacaacccgatttcgatgttgtaagcctgtcctgtttccgggcacctggcatagccgtgggccgccatcatagcatccgcaatggcctttttgctgatagactgtacatctcgcacagaccccagcttagaaagcgcacttttccccgtgactgtaaacgccgcatctgccggcagcaaatgcctccaatccaaggcgcgcacaccgtcaaatagctctgtgaatgtcttcgccttgcaggttcccagctgtacaaacacacgatccgcacacctaagccaaagattcgccttgatgatcagcgctctgtccgcttcaaagaaaacgcgggcatcttgtgcgcgtacatttttagcgcccagcataatcagctcgtcgcgcaccagcgcctccacgccaaacatacaggttgcaaagcagatcataataccgtctcctgccctgtgggcggcggtaccggcggctgcgcaggccgtacaggcgtgttgttgatcagcattccattgaccaaaaattcaaaccggcagcctaaaaattggcttgccgcctcggacaatgtcatcctggacatatagatgttcaaaaactctttgacagaagagctgtcgtccatcttgcaggcaaagcggatcactctattttcgctgtcaatggatacctgcgtattgcgaatggaatagtttacgcggtcgtgtatatcgttaaaatcatattttgtgcgccgtacccttgccctgtgcgcatcgatcttatccgcaatgataagtgctgcggatatctccgatacagggcatccgctgcgttcatcatggttgcccacagcgctgcatatgcggatcacctcggccacgggcatccccatttctctgagcaacggcatcaaaagcgtagcgcccgtctgcgcatgcccatctcggttgatggcgttgccaacatcatgtacccagcccgcaatggcacccagctccacggtgcgctcatcaaagcccagttcatgtaagatctgcctggtaatcctgcttacatagcctacatgccgtgggccatgatcggtatagcccatggcttccaagcaggcattggcttgttctatcaggatggcgatggtttcgttggccatcacatcgcttagcataataggtttcattcctactcctcttccatcattgccattttgatggcctcgtaatctttatcaccggcaaactcacgatccaattccacccacgcgcccagctcctccgcagcatcgcgaatggcgcaataggtatagtaatccagctttggatcttttagctgctttgtcagcatctctacggcccgttcatcacccagctttccaagacagctggcataaaaggccttgtgttccgggtttgcctggcaaaataaggcagacaaccgctcaaaggccccttccaacggccactggcagaggatatctgccaagatctgttccgtctcctcatccacttgtgtattcatcagcgccaacgccttttccgctgccttggcaccaaactgctgcactgcctctacccacagctgtttttcctcatcctctacggtttgctctaatatcttagtaaagcctacctccagcaacggtgggtattgcatttggcataaaagctccagcatctccccccttacagagggcaacgcacgctctagcaagcgaaacaagcgaaacatcgcttgggcggtatcctgatcctgctgcgctaaggcgcgcgccagctgtcctggcagctcctcgccttcttcccagtaatcccaggcaagctccagcagcgtcggcccatcgaattgcatatagtattcgcacggtgtcagcccgcccagctgtgtgttgggcgtatggttaaattcctcataccattgatcggaaagcgcttcgatctcctcatcctttaacccctgggcctgtgccaatcgcggctggataaacgcgcggtacagctgttcaaaatcgattttcattccttctcttcctccatcgcagccagcagcatcgctcggtacggcgattcctcttccggctcaggtttcctgccaagccccgctttttctctggccagactgcaaagcgcacccgccatcttttccggctccaaagccgggtactttccatgtaacgtctctacatattgtgcccaaatcgatagagccaacagcattgccgcttcctctttttccgccagcatcgcacggcacaacgtttctacctgccgatatgcttccggcaaattctccggcaaatgcggcaccaacgatacccgcgcctccatcagcccgtccggcgtcaacgcaatatacggctctttagcgcctatacgtttgagcacgccgaaaatatactgcttgaggcccagttccatctctgggatcatcagcgcttcacgcagccattcgatagcgtctggcgtaccgatcaagcccaggatctccgccatggcctgtgtcatgtgttcatccatcatatgcaagccccaacgcacagtatcgcggaaggttgcgtcgttttcccatctttcccgtatcttctccggcgtctctctggaccatgcgctgatctccgtcatgcgctgcaagatttctccaggcggcaactgtggaaaatattccagccttttataatcagcttctccctttaatgcctttttggcaaccgtcctataaaaaggcgcaatggaaaaaaagtcgtctacctgaaccatcacatcaaaacacttaagtgccttggcatactctttgcagttgtacgctgcaatgccggtacaaaacagcgttttagggtcaaagggccgctcctccaatgcttgagagaaaaagcgcaacgcgctttcatcgcgcccagcctgggccattgtcaacgctgccttatagatttcatccaggctttccggctgcatggcgtcgagcttttccaacagcgcatattcttcctgccaattatgcttttcattggcaaaaatcagcagattgcagactgcgtgtacgttgtttggctctgtttttaccatctggcgtaccagatccgacgctttatccggttcctgattcatataatacgccaacgccaggttgtttttggcatacgaaagcttaggcgcctgcttaaggacgccctccagtaccactgcggcctcttgaaacctaccacggtccaacagctgtttgccaagctctgcctgctgggcagtttcctctgaaatcccttcctcctctgccatcaggcgcagctcctcttctataaagagcagcatatcctccgcctgctcggccaatggcccatagggatggcgctgcaaaaacttggataaggccgaagaagccagctcatattcctgcatgcacaggtaattgtaccctatgccaaattcacagctctccggcacgggctctgtctccctgctcagccgaagcagccattggttggattcttcatagcgttccatatcggtcagaatttccgatatttttaatttatattcgatattgtccggcgctctatcgatggccttacgataattttgaaaggccaaggccagttctcccctgtccgcataccgttgtccgttttttgcgtaaaaggaaggctcctgtgcaaaggataatactttattgcctttgagccataatggcttttgcatcgatttgatcgtcttgctcctttatttctgtctcttatacacatctgacgctgccgacgagcgtggcatacgatttctgcctggtgatcctcttcgatgatctcccgaagatccttttccccaatagagatcagcgcacgctccatcttttccctgctacagttgcattgatagcataccggcacggtctgcgtcagttccatccgcatacccgagaaaatagactgcacagcatcctccagcgtcattccttcggatagcataaaggaaagcagcccacagcccgttgcgcgttgttccaactgctgcaagacatcctcccggcatcccggcagaggaaataccgccatagcccctgcgctttttacgctggcatcgcggtctaccgtaacgccggtaaaaatcaggcaagggcgctgttcggaaagcgtaaagtaataagcgaaatcttccgccacctctccggtcttcagctgagtctgcccaatatatggttccctgccgccgttgtccttcaccactgtcagacggcccgcatgccccagaataccggatacatccagctttccgtccgtttggcggatcggcagatccgcctccgggttctcaatggcagcgcgcaccgtacccttgggcgatgccacagccaacaccttgccagccggccctccgccgtcaatggcgcatgtaacgtcgccgttttccgccttaatatcggatgccgtcagcagcgctcccatcatcagccggcctaccgccgccgtgttggtaggggaaagatgatgaatcactcttgccgtctctacggtacccttggccgtcagcgctacggcataggcttctccgttttccagcgaataatgccttagctgatcctgtacttctattatcatatggatgatctccttgtttccattcaatttttcttggcaacaaactgccatctgctaccatcggcctgcggcttatccttggtaccaaagccatacacatgcaccagatcgaatcccacgttatacagcgttctttccagcgtttccatagcatgcagatacagcgtatggcgctctgttgtccgtgcgtacagcccaccccttcgttgggtaaaaagcgtcagctccatcgtacacacgctgtcgtcggcctctgtctgcaaaatataggccgcatcttcctccagctgacagtagctgtcacagccgatttcttcttggtaatgataaggagtgctcacatcaaagagcagcaacccgttatgcggcagttgctcgtatgccgaggtaaagaacagcggcacctgaagcggcgaaagatagttcacgggatcgcacgtcgcgaccaccgccaccacaggccattccagatccaggcaggtcatatccatctgctgaaagcatacagaaacattctctgcccgcgcattttgcaccgctttttccagcatagcatgcgaaatatccccgccaacaacccgatagccgtttttggccaatgcaatggccgtcttaccggtaccgcatccaatgtccagcacgcgggccggggcttcggccgcaaagtctgatagcaagcgtatgacataaggggcaaatgcctccgtttgttcattcataaatctatcatatacctctgcgaatgtctgatacatcgacatgcgttccccctccttttttgactttatattgtatcatatcttccgttgtttccgcaatgtacgccctattttcatccttttccggcaatttgttttgctctccgcttcacaatcacctaaaaaccgcataagatatgccgaacggcaattgacaagtgctttccctgatgatacactgctaaaaaaagaatttatcttaaagcagaagtagaggcgcgcattttaggcgtaccggcggaaagggggcgaacacccattggatctgtcgggaagggaaaatgcgccgaagggaaatgaggcgttcgcagcttgttttcctggatgcagcgaggagcggcgctgtatctgtcacgattggttcgtggagcgctgttctgtctgaatacgcaaggcggtattgttttgctttgcagtgtgtaggcaaaagtatcgtgtaggcattgtgggcgccacgggcatggtgggccagcgctttgtttccctattggcagaccatccctggtttgaggtcgcggttgtagctgcctcttcgcacagcgcaggaaaaacctaccgcgacgcagttggggaaaaatgggctttttcctggcccattccagaaaaaactgcggagctaacggtgttggacgcatccaaagtggaagaggtctgccgggctgtggattttgtgttttgcgctgtcaatatgccgaaaccggagacaaaagctctggagatcgcactggccaaaacagaaacccccgtcgtttccaataacagtgcacagcgcggcgagccggatgttcccatgatgatgccggaggtcaacattgaccacgccaaggtcatcgacacgcagcgcaagcgcctcgggacaaaacgcggctttgtcagcgtaaagccaaattgttcgattcaatcgtatgtacccgccctgtctcccctgctggattttggcatcaagcaggtttcagtatgtacatatcaggccatttccggggccgggaaaacctttaagacctggcctgaaatggtagacaacgtcatcccttatatcggcggtgaagaagaaaagagcgaacaggagcctttgaagatttgggggcatctggaaaacggcgtcatcgtgccggctgaaaagcccgtcatcagcgctcagtgcttgcgagttcccgtgcaggatggccacacggcggccgtgtccgtcaagtttgcccaaacgcccaccaaggagcaaatcatagagcgttggagcagctttaagggcgctttagacggcatggggcttcccagcgctccaaaaaaattcttaacctatttcactgaggacgaccggccgcagacgcgtttggatcgtgatctgtacggcggaatgggcatttccatcggccggcttcgtgaagaccgcattatggactatcgttttgtctgcctgtcgcacaatacgctgcgcggagcggcaggcggcgcagtcctcaccgcagagcttctctgcaagctcggttatatttgtcataagtaacgagaggagcaaaccaaatgagtcgtctctttaccggcgcctgtgtggcgttggcaactccctttcaggaaaatggggctgtggattttgacgccctttcccatatgctggaatttcaaattgaaaacggcacagacgccattctcgtctgcggcacgacgggcgaaccgtctaccatgacgcgagaagagcagaaaagcgtcattgatttttccgtaaaacaggtggccggccgcgttcccgtgattgcgtccaccggaggcaacaatacagcagaagtgattgccaaatctcaagatgcccaggccctgggggtagacggccttctgatcgttacaccctactacaacaaaacaacgcaggcggggttgattgcgcactacactgctgtggcggacgccgtagatcttcctatcatcgtttacaatgtgccggggcgcaccgggctgaatatgacgccgcagacgctttctgtgctcagccatcataaaaacattgccggcatgaaggaagccagtggcaatatggcacaggtttccgaaatgattcgcttgtgtgaagatcgtctggatgtttattccggggaggatggcttagtgcttccgctgatggcgttgggtggtaaaggcgtgatttccgttgtttccaacatcgcgccgcgcgatatgcacgatttggcggatgccatgcttcgtggagatcttcaaactgcgcgcacactgcaattcaaggtatctccgctggcggaaaagcttttctgcgaagtaaaccccatccccgtcaaggcagcgttgtctgccattgggcaatgcaaggatgtgcttcgtttgcctttggttcccatgggcgatgccaaccgtgcacttttgctacaagcaatgcgtgattacggcttttcctgctaacccttttccgtaaaaaaacggcgatgccgtttttttattgtgtattttgtggtatgctaactatggtttttagcatttatcgttgctatcgtatagagtatggatggacaaccccacggttgtcctaaaaggagtgttttactatgatacatgttttgatctcgggcgcgcttggctccatggggcgtcaagtcgctcaggccattgaagcagatcctgactttaccgtcatcgcaggggtagatatccatgcggacgattccctttcctatcctgtatacgaagggttcggtggcgtcaaggaaaatcccgatatcatcttcgatttttctcgggctgatgcattggagggtgttttggagtttgcaatggaaaaaaagctgcctgccgtgatctgtacgacgggtcacacgccctctcagaaagcgtatatttcgaaagcagctctgtccatccctatcttttattccttcaacacctcgctcggcatcgcgctgacccgtgctttggtgcgtcaggccgcccaaaccttgggagatgggtttgacatcgagatcgtggaaacacatcacaatcgtaaggtggacgctcccagcggtacggccgttatgttatttgattctttaaacgaagcccgtggaggagaccttgttcccgtatatgatcgtcagtcccgcagagaagcgcgcaactcacatgaagtaggtatgtccagtgtacgcggcggtaccatggttggcgaacattctgtattcttctttggcccggatgaagtcattgagattcgccatcaggcattttcccgccaggtatttgctacgggtgctctgcgcagcgctaaatatctggtcgataagctgcccggcttatatgatatggacgacgtcatcggctaacgcctttcttttctcatcaaacgaaaaaagcgctgaaaccagcgctttttattgtgcttatttttggcgatacataaccttttccaccagcccaatgtacaggatatgataatccttctcctcataccacttttcaatcaacgctcgatccaaaaagctctgctctaccatcggctgtgcaaaggcttttttgcaaatcagcactttttccgcctcttcaaaatagggggtatccccgcagtgcgcaatggtaaggccggattttgcaatcttgtcctcttcccggccggataccgttcccaaatagcttagggtttttcgatagctttcctcaaagaatgtcaaggaaaaagtatccgccgcatccaaaaactccttggtatatcgctgtgggcgtactacaatatacgcagcgctctgcccccagatctcgcctagaccgccccatgaggccgtcattgtattgaccttcccatccttctcagcggtaatcagcatccactgtttgccgatcagggtaaacgggttttccataaacgcatcgattttcactgtttcaaaggctgccataacgatcctctccttttttggctttatccttattatagcacatcaaggctgcaaagcaaaacccaaacaacgccattgtatcgtatgccgcctatctcttcgctatgccctattcacttttggcaaatgtgccagccgcgcggaacagcggcacgtccgtttcatcattgttcccctggatgagaaacgatgccccctgctcttcaatttccatacgtattttttccccggcaaaggcctgctgcaagtagttgatctccagatccaaaattgtctggttttcataacgctcaggtgcaaagcagtcgcatacccagctgatatagcgcgcattgttgacgtgcctattgcggtcaagatcggaataggccggcgtgtagtaaacaggcgggcgtgtgggctgcggctgcttgagcttgcgcggcatttccactgggacacccaagtcctctgtatccggaaacatcgcattgattttggggttcacggccaatctttgtttttttacatccaacaacgtccaaatggaatgcacgccgccaatgcggcaaccagactcgtctgtcatttcgcctagtctcggcatgcgcgtcagctgataacgattgcgcgctaccacccatacatatccctccattacgggagattgcgcacctatctctaaaatattcgcatgtacgtccgacatatcttccagtaattcaaatacacggaacggccgcagcctttcccgataatctacatctgcaaatccaataatgttttcctgtttatatgatttttgcaccatttttctcctttacaagaaaaggcacttggcagtgccctcgctgattgtttgtttacacttcgctctcgtctttattgataaacgcttctaaatctttatcggtaatgcgccagatcttcccgttgatttttgttcctttcagcgtaccttcccgcagccaattccacaccgtatgcttacgtacctttagaatgtctgctacctcttccggggtataatacgttgtcatgtttgcacctcatcatctttatcgtaatggaccaaatcgtaatattctccgcctaccgccgggcattgcaatttctacctaacagcggtacactttaatctaaccaagttaccagaaaggaagaatcctttatgataatcgattttcatacccatgctttcaacgaaaaaatcgtcgaaaaggccttggccagtcttacggccaacagcggcctgatgccccatggcaatggcaccgtacaaagtctggtagatatacaacggcaaaacggcgtcgatctatccatcgtatgcaacattgctaccaaacctactcagcacaaggtcgtcaatgattttgccgcctccatccaagcacagacgccctatgccattggcttcggctctgtacatcctctggccgaagacgcattggatgaactggatcgtatcaaagcgcttggcctcaaaggcgtaaagctgcatcccgattaccagcgctttctagtggatgatccccgctgtatccccatctatgaaaagatcagccgcctcggccttattaccgtgtttcatactgggttggacctaggtgccgacggcgcctttgaaaatacgcctgagcgcatgagccacatactgcctgccttttcaacgccagttgtcgccgcgcaccttggcggcggactagacccagatagcgtattgcgctatctggtcgggcgcccaaacgtctatttggatacagcgcattgctacgggcgcatgcgccatccaagcgccatagaaattgtacgcgctcatgggcctgcacacgttttgtacggcagcgacatgccctggagcggtccaaaagaagagctgtttttcatccattccctcggccttagtgctgaagaagaagccaaggtcttgggcggtaacgcagaaaaattactcggtctgtaaacgaaccgggtaatctcttcattattagagcataccgcagagaatttttttgtcaatacctttggcccgttgcttgcatcatttgtccttttttctttggaataggtgctctccttttatcccctcgttcccgaacattcccttgccagtaccgcattcgtatgctatactaaataccgattttattgaggagaagtatcgaagtggtcataacggggcgcactcgaaatcttgcggggagctgtccgtttcgtccagccgaaaccttgtaaccatgcgggttttacccggttcgaaaattgaataagtttgctgttctttccgtcagttctttccaaagcctttttctatcggaaaaaggcggggaaaaacgacggctgagcatatagggagcggtatcgaagtggtcataacgggcctgactcgaaatcaggttttccaaaagttttgggaacgattttcggattgacatatggagagttgtccgagtggtcgaaggtgcagcactcgaaatggtcgagcagactgttcgttttgtccacccgaaaacccagcagtcatgcgggtttgtctcagttcaaaaaagtgaatattttgctgttctgccctgttgttctgtcctcagtattttttcggaatttcaggcttaacatatggagagttgtccgagtggtcgaaggtgcagcactcgaaatgctgtgttcccaaaaggaacctagggttcgaatccctaactctccgccaaaaagtccagtaaccatgcgggtttgctggacttttcttttttctccaagtggtttgtgctcaacattttttgcgagacagaacagccaaacac

SEQ ID NO: 4620 - DNA, 9359 bp, Unknown
  16S sequences of unknown bacteria
attgaccgattatccgctattgcttgatttggggacggttgcggagcaaactctaatataaatctataaccattcaatctgaataagtgaaaaattaaatgaaaaatgtcgaaaaaattagccgattcaggtgtgaaatcggctaattttatgtatgcggataggaacgaaaacacgtaaatatagtcgctgcgctaagaagctgctaagatgatattctactggaaatggaaagaatagtctgtacaacgttttcttctgctgtacatgaaaattttaaattataatttatagaatttatgtagacttttggcaaaaaccatgatatactaaccgcgtccagtcaggaggcgtgtcgagacgtctgcggaatgggaatccttcgcaaattcatttccaggcaaaatccgaatggcaacagctctgctccaccgattgggagagggctggtatgtgtacgcgttttcgatgcgccactgtgaaccttcgcttctgcgttcttcccgtatgaaagaaaggacgcggtccggcggctgtttgagtaccaggcgaacagctgcgggggactttctgagtccgcggaggttcgcagtctatccgaatttccagaggaggaagaggtatgaaaatgaacaagctgctggccctgacgctgggattggccctcgggctgatgatctgcgccttcgcctgtgcgcaggaaggggaaagtgttgggctttccgctattcctgagatccccgcggagctgatcgccgagatccccgcggcttatgtggaggaaccgtccgcagagcctgcgcagactccctcgattcccgtggtgctgcccgcggtggagaacagccaggagtttgtgcccaccctgtcctccaactatgcgtatatcagcggcggcacccgcctgtataagaccgccgcgaaggacaagctgctgggcaccttcgccgggacgaaccccgtccgggtgatctggcagaaggactattataatgaaacgggagacgtcgagtactctctctatcaggccgtcttctatgccaacggtcaacgggtggagggctatttctatgcgtccgcgctgggcttcctgaccctgagggacgaggccgagctgctggacggctccgacgagctgaaaattctgacggcggacttcgaatttgcggcggatgaaacgcccgcgccggactatccctgcaccaacaccaacgcggtgaacctgcgcaagggtcccgccaagagcgaggaaaagctggctcagctggccgatggcacgcacgtggacgtgatcgaagccgtgaccaacgctgcgggcgaggtctggctgaaggtgacggccggcggcaagaccggctatgtgatggcgggtctggtggacggatatagcgctcccgctggggaggacaagcaggagacggaggagccggtacaggaagaacgccagattcgggtgtctgcttcttacgatacggacgaactccagctgggcagccgcattacgcttacggcgaagctggagggatatgacggccagagctatacttgctgctggcagtatgccgccgccgataaagagggaaatatcatcggagagtggcaaaacgcgcaaagcagtgcgctgtcctattcctacacgctcagcgaagaaaatctgcttaccgcatggagaatgtgcgtaaccatcagcgaatgatcttttcgctatgtgactgaaaaaagcatatcggcagacagggaggagaaaccatcatgaaaaacggctttcagaagcttactgcgattttcatgaccgtcctcatgtttcttgcggtcattcccgtaagcgcatggggagcggaacaatattccaacagcgtggtcccgggcatcagcgtgctgagcattttgccgggagacaccaacacgatcacgtatattttccagaaaaagaacggcgagcaaacggaggaaattgcccggcagatcgtgaagaagggcgatactcttctggagcctgaagtcaaaacgggcgaaaatgaaaagttcaccggctgggatcctgccgtcacgtttggaacggtcggagaaatcacagagaccaaaacgatcacggtaacggcgaagatcgaaaaggtttactatatcttcttcaaggataacacgggccgtgtcgtagctacgaaggagtgcacggacggccagacggtcagcgatttcagcgacgtgaccttcccggtcggcccggatgaaagcattaccggctggtacttcgacgaagcagcccaaacggaaaaagcggactctgtgaccattaacggcaaaaacgttacgctctatgccaaggtcgaaaagggctactggatcaccttcgacgcaaacggcggctcttataccgcgcctgtgttctatgccaacggtacggctgctgctgcacctgtgacgaatcccacgctgccgggctattcctttgatgggtggtatttggataaggactgcacgaacccggcaaatttttccgagatcaccacctctacgacggtatatgctggctggaaagctgctgatactacttatacagttatccattggcaggaaaatgctgatgataacggctactcttatgcagaaagtgacaaagatcagccaggtgcaagcggagcacaaactgctgcaagagctaagtcttatctgggctttactgcgcagtcgattacgcaggagacgatcgcgggcgacggttctactattgttaatgtgtattataaacgaaatgtatatcaagtgaatttctacagtaaacatgaacacacttatgacagtaaaaaaggacgctattattatggggggtgctatccaaaaactggcagtcgtactccaaattgtgggaaacaagaaggaaattggtactctgaatatactattacggcaaaatacggagaaaacattagtaaaaagtggccgggtggcacatggaaagtctctaaaaatgggacggttgctcaatctaatattgatgtaatgccactgggaggcgccgaattttacgaaagagatcagggaagcggaaaagcctattattatctggaagacctgaatggaaattatgtactggatcacacggatactggcgcttcaaccagctctactgttacaaaagaagatcgttatgatatcacaggatttacttgtgatatagacagaagccctagagatggaagtaattataatggagcaaacttctattacacccgcaatagctacaatgtagtttacgtcagtaatggccaaacagtgaataaagcttcctataaatatgaagcggacatcagcaacgctggcagctatgttcccacgactgcgccggtcggaaaagaagattacgtgtttgccggctggtatgccgacccgacgggacagacgaagtatgacttcacaggcaaaaaaatgcctgccaatagcatcaccgtctatgccaagtgggtgcccccgacctacaccgtgacgctctacgatcatgacggcaaccaagtctgcgcgcttacgatagccaagggcgcaaagcttgatgaaagtcaggtgccgacgatcacgctggatgagggagaaaccttcctcggatggaagctgcaagacggcacgcctttcaaccttgataccgagatcaatcggaactacgaactgtatgcccatgtcggcagtacaaagggatatagggttcaatacgagggaggcgaagacaccaccggcgcagccccgttggatgacacaaagtacgccgaaggctcttatgcggatgtaaagctgcccggtgatctggccatgaaagacaaggtattccttggctgggcaaccgaagcgactgcccccactacgatttaccagcccggagacaagctgcccattgaggcgggtaaggctgtggacggcgttattaccctctatgccgtgtggggagacaagcccgtccaaacgaagctgacctacaatgccaactttggagaaacgcctgccgagaaggtttgtgagctggaaaacaatgcaacagtgacgattttggactatggcaatgccgaactcggactgccgacacgtcccggttacgagttccttggatggtcggaaaatccgaatgcaacggaagcgacctataaggctggcgatcagattatcgtcgatgagactgacgcgacacccaagaacattctgtacgccatttggaagcaaagcaccgtcaccctgaaaatcaccaagaccgttaccggcaacttcggcgacaagagcaaagcgttccagttcagcatgcaagtagacggcggcaacagcgttgaactgaccgccaaaggaacggcactgcccaggggaagtcaaagcgattacatctttagcctgaaagacggcgaaaacatcgtgatcgagggcatgcccgttggtaaaaagatcgtattggcggaaacaaacgccgaacagtacaccgtttcctttaatgatacggttgagactaatcggaattacgtcaatgaaaaaggcctgaaggagaatacgaccatcaacgtcacgaatcaccgcaacgtctcccccgacaccggcgtcttcgttgattccctgccgtatatcctgattatcgcctgcgtggcaggcgcagcggcgctgttcctcatccgccgtcggaagaaccgtgaggactaaggagtaacaaaacgatgccaccaaggaacggacaacagcccgcgcaaaagcccgttcagagccgggcgcagggacgaaaggaaaccatccagcccttgaactgcgaacagaagcgcatcctgcaatggctgcgcaaggtgcgcttccgcaagcagcttttcggcggaataagcgagcgcgacgcatggaaaaagatcgaggaactgaacgccatgtacaataacgctctcatggccgaacgggcgcgctacgacgcactgctggaacggcagcgctgggagtatggctatggctatcagccgtccgacccggcgcaggggtatgaagccgacggccagtctgccggggaggatgggcagtaatggccgccaaaaagccgcgtacccccgaggaagccatcaaacagcgccgggatcagctggccgccaaggccgaaaaccgcagtctgctcctccgcgtggtgctgatcgctgtggtgtgctggtgcttctttcactacctgtttctgatcacgcaggtcaagggcatggacatgttccccgccgtgaaggacggcgacctggccatcgtgttccggctgcagcaggagtacgccaagaacgacgtgatcgtgtaccgcacggaaacggggctcaagttcggccgcattgtggcccgggccacggataacgtcaccatcgacgacagcggttcccttaccgtgaacggcacgacccagaccggcgaaatcctctatcccacctatcccgaggtggacagcagtctggcctacccctatcaggtgccggaaaacagcgtgttcgtgctgggcgactaccgcacccgctccaccgacagccgcctgtacggggccatatcgctggatcaggtggagggcaaggtcatcaccattctaaggcgcaggggcctctgacccgcgccgaacatccacggtatcagcccggctccactcgccgggaatgatataacttccctttcaaaatctgaaaaacaaggagagaaacaaaaccatgaaaaagtttgttgcgattctcttgaccctgatgctcgtgctgggcgtgagcggcgcgctggcggcggacgccgaaagtgtggttatcaaaaagtcatataagctggttggcgctggctccagccccgcagaaacctttacgcttgagcagactggcagccgggtgcttgatggtgacgccactgctgcccccgcgctgggtgccatcaccggcgctgcgtttgatgctggcgctgctaccgtcgatggcgttaccatgcctatcacagtaaaccttcctgtgtacgacagagttggtaaatatgagtacaccttgaaggaagtgcagggcaataatgctggcgttggctactatgacgctgccatgaagctggttgtgacggttatcaatggtaataatggccttgaacgggttgctgctgttcataccgaattagccccaggcgatgccaagagcgacaccttcgaaaacacctacagcgctggcactctgactgtgaaaaagaccgttaccggtaatctgggcgacaagaataaggaattcgacttcaccgtgacctttgccgcgccccaaggtaaagactggacccctgccattggccttccggagggcgcaacgatggttgcggataatcctatgtcctacaccttcaagctgaagcatgacgccatggccacctttggaaacctgcctgcgggcgtgaactacaccgtgattgaagctccggttgagggctacaccaccaccagcactggcgaaaacggcgtgatcatcgctggtttgaatgaagttaccttcaccaacgaaaagaagggcgagatcgacaccggcgtgaccaccgagaatctgccctacgtcctgctgatcggcttcgtggtgctggccggcgctgcgctgctcatcaagcgcaaggctcataacaactaagcatttgactgacacgcgccatgtcccggggccgggaaagcggaatcccggccctgacagggcgccatggaccggcataaaggagtggcaggatgggaaggggcttcgtcagatttctaaatggtctggtcagtctggccgtgggcctttccctcctgatcgccggggcatatgcgggctattgcctgtgggataatcaccagatctatgccgccgctgaaaacgttcaggacgatatgatccggctcaaacccaaaacagacgacacagccgaggaacaggggccgtccttcgccgagctcctgcgtgtcaatcaggacgtgaaggcgtggctcaccctcgaccatacccagatcgactatcccgtcctgcagggcgaggataacttcacctacatcaacaccgacgtttacggaaacttcgcgctggcgggcagcatctttatcgactcccgctgcgacccgtcctttgccgacccgtataccctgcttcacggccatcatatggaaaacagcaggatgttcggcgatctggatctttataaggagctggactttttccggcaatactacacgggaaccttaattatccccggctatcagtggcccctgcgggtcttcgcctgcatggtcgtcccttcgtccgaggaaaaaattttcaatcctaccctttggaaaaaggatgggatcggccggctgctttccttcgtcaaggccgaagcattgcattacgacgctgaaaccgtggccatgctggaggacaccatccaggccggtgaaacgccccgggtcatcgctatggccacctgctcgtccgaatatacggacgcaagaacgatagtactggcggttttgaacgactacggccaggaaaacagggaggatgtttgaatatgaaatcgaaccttcgcgccattttggtcactgtgattgctctggcgctgtgcctgaccgcgcttatgcccgccgcctttgctgaaaccgccgacaactccttctccgttacccttcatggccgggtacagcttcgcggcggatcgatccccatatcgaaaatggatcgtttcctgatccgcctgacccctgccgacaaggaatgccccatgcccaaaggcagctccgattatttcgacgcggaagccgtaggctatgcgcgtgaggtggacgtggtgttccccatcaccttcacgaagctgggcgtttatcattatacgatcacgcagatcccgaagaacatcaaccccaatctgacgtatgaccggcgcacctatgacgtgacggtcagtgtttttaacggcgaaaacgggatcgagaccgctgtcgccatgcggctgaacggttcagaagccaagactgatctggcgttcttcgtcaacaaatactccagtaagcccggcacgctgacccccaccggcgtcagccaaaactggccgtggcttgtggccggatgcgcagcgctgctgattgccgccgcattcgttttccgttccctccgcaagaaggagggcagcgcgcaatgagccgccgttatcccaaaaatcgaaaaaaacaggggggcgcacgtcgcgccctgcttgtttttcttctgacagtgctgatcctggccgcgctggtgctgggtacgttggcgctgcttgaactttacgagcagcattcgctggacagcttctacgcttccctgtcccggaacagtgaatggacggcagacgacggcggagaggtcagccttcccacgctggcgaccgtcctgccgggccccacggccacgccgtccaccgcagacgcacagtgggtgccgcaggccacgcttccgccctcttatctggacgtggagtccgaacagccccaacaggccgtctccgaaaaggattttgccaagctgcgtcagaccatgccggacatcgtcggctggattcggctggacgacagcgtgatagactatcctgtggttcagggcgaggacaacgagtactatctgaagcattttcccgacggtacgcagaaccgcttcggttccatcatgatggacgaagccaaccgcggcgatttcagcgacacggtgaacattcttcacggccaccacatgcgtggcggctccatgttcggcggtcttcaccagtacgaaagccgcgagtactgggagacccaccagaccatccgtctgatgacccctgacggcgattacgacgtggccgttttcgccgcctacacagtgaacggctacacgtttacctatcccaccaatttcgacaccgaggaggacttcaacaagttcattcaccgggctatcacctccacgccttacgacacgggcatagaagtgaccttcgaagaccggcttcttatgctttccacctgtgtctacaccttcgatggcgcccgtttcatcgttctcggcaaaatcggggattgagtcccccgttcggactgcgcgcctgcggcgcgcaggggcatagggagagctgcgaaataccgccgctcagcgacgggcctcgcggctcgcgcaaggggtagtaccccttgaccccggactgcgccgcgggcgcgcaggggcatagggagacgtgtgagttggctgcgaaataccgccgctcagcgacgggcctcgcggctcgcgcaaggggtagtaccccttgaccccggactgcgcgccgcaggcgcgcaggggcatagggagacgtgtgaattggctgcgaagataccgccgctcggcgacaggcctcgcgcaaggggtagtaccccttgaccccgg

SEQ ID NO: 4621 - DNA, 28379 bp, Unknown
  16S sequences of unknown bacteria
gggacactctcttatttttgtattcaggcagaaatttgaagcgaggcggtaaagtcaaatatcttacgcgagtgaggaaataccgcggggcgagattttaccgctcctgacgaatggcgtctttcatggattttacatatctgccgataggttccggagcgttttttccgtgtttttcgagcagcttgacgatcgctgagccgacaatggctccgtcggagatttcagccatctttttcgcctgcgcgggagtggagatcccgaaaccgacggcgcagggaatgtctgtattttgtctgacgatatcgatgatcgaagatagatcggttttgatttcgctcctggtgcctgtgacgccgaggctggatacgatgtagacgaatccctccgcttcttttgcgatcatggcggtacgatttttagatgtaggggcgataagcgatattaaatccacaccgtatttctgacagatcggagaaaattcggatttttcttcgaagggcagatcggggagaatcagaccgtcgatgccgctgtccgcacaggcggagatgaagcgctctgagccgtaggaaaatatgacgttggcgtaagtcataaacaccagggggatctttacgctgcggcggagatcccgaacgaggctgaaaattttgtccgtagttacgcctccgtttaatgcgcggagatttgcgtcctggataacagggccttccgccgtgggatcggaaaaggggattcccagttcgatgagatcggcaccgtttttttcagcggcgcggacggctgcggcggtagtttcaagatcgggatctccgcaggtgataaaggcgatgaaagcctttccgttttcaaaagcttttctgatattactcatcgatattttctcctctgtaacgggcgatggaggcacagtctttatcgcctctgccggatatagtgattacgataatctggtccccggtcatcgcgggcgcgattttcatcgcatgggctactgcgtgagcagattcgatcgcgggaataattccttcgcacctggcgagatattcaaaggcctgtaccgcttcttcatcggttacggggacatactgtgctctgccgatatcgtgaagatgggcgtgctccggaccgatgccggggtaatcgagtcctgcggaaatcgaatagaccggagcgatctgtccgtattcatcctgacagaaataggacttcatgccgtgaaaaatcccgactctgccggtgttgatggtagcggcggtttcgaaagtatcggtacccctgcccgccgcttcacagccgatcagttttacatctttatcttcgatgaagtgataaaaacttccgattgcattggaacctccgcctacacatgcgataaccgcgtcgggcagacgtccttctttcaccaggatttgttctttgatttcttttgaaattaccgcctgaaagtcccggacgatggtcggaaacgggtgaggacccataactgaaccgagacagtagtgcgtgtctgcgatacgggacgtccactcgcgcatcgcttccgatacggcgtctttcagagtggctgtgccggatttcactgcgatgacttccgcacccagcagacgcattcggtatacgtttagagcctggcggatcgtatcttcttctcccatgaatacgacgcattccattccgaggagcgcggcggcggtagccgcagcgactccgtgctggccggcgcctgtttcggcgatgaggcgcgtttttcccattttttttgccagaagagcctgtcccagcacgttatttattttgtgagctccggtgtgattcagatcttcccttttaagatagatttttgctccgttcagatcttttgtcatcttttccgcaaaatacagcaatgaaggtctgccggcgtattcatttaacaatgcggtaagctcgcggttgaattcaggatccttcctgtagtgattgtaggattcttccagttcgatgacggcgttcatcagggtttcggggatatattgtcctccgtgtataccgaaacgtccgttgggatttgtcatatcgcattttcctttctgacagcggcggcaaaggccgccattttcgctttatctttgtatccgcaggtttctatgccggagctgacgtctgccgcataagggtgcagcgaccgaatggccggaacgatattttccgcattgagtcctccggcgaggaaatagggttttttgatatttgttattaatttccagtcgaatgtcgttcccgcgccggcgccggcatcgagaaggacaaaatccgcagcactttgttccgctctgacaatatcgtatgcagtttgaatctgaaaggcttggattaccggttttttgcagagaagtttcagctgtcggacgtatttgtcatcttccaaaccgtgcagctgggcgatctcgatgacgccgctttctaagagggcggcgatattttccggtttctcgtctgtaaagacgcctactgttttgatatcggggcacaaccgtttttttagttccgcggctttttcggggcgaatataccgtttgcttttctgggagaagacgaagccgatgtaatccggtctgatttcgtttgcggcttcgatatcacatagccgggagaggccgcacagttttatctttgtcacagcgcacctctcagttctgcgagtttcgcgtttttatcggatgaacgcatcagggtttctccgatcagaacggcgtcggctccgatttttctgagctcttctgtgtcctgggcgttctttacaccgctttccgaaacaaaaaggatgtctttcggaaccagatccctgagccgtcggctgtttccggtatcgacggaaaaatctttcaggctgcggttattgacgccgataatgcgcgctccggcatttaccgcagccgatatttcgttctcatcgtgggtttccaccagagcggaaagccccagttcatcacagacggagagaaattctctgatctgcttctctgtgagaagcgaacagatcagcaggatggccgacgcgcccagaagcttcgcttcatagatcatatattcatctacggtaaaatccttgcgcagacaggggatggaaacggccgccgaaatttttttcaggtgttcgtcgcttccgcagaaccatttcggttcagtcagtacagaaatgcagtcggctcctgccgcttcatattctcttgcgatcttctcataaggatagtcgggagcgatcagtccttttgagggggatgctttcttgcattcacagataaaggaaagtccgttttttttcagggcgttttcaaagatgaacttgtccttgggcagtgagagtgcttggcgccggatttctgacggcggcaggagtcttttcttctgttcggtgcgctccttcgcatgcgctgcgaggcggtcgagaatcgtcatatttcttcctccgggcggttgctgacagtgatgagccggttcagtgtttccgcggctttgccggagtcgatcaattgggcagcgaggatgattccgtctttcatactgccggcctttcctccgatgtagagcgaagcgcctgcattcatcaggacggcatctcgtttcggacctttttctccgcggagaatcgaacgtgtgattcccgcgttttccttcggcgtacctccccggagatcttcttttctgcagcgctgcagaccgaagtcctcgggggtgataacggaggatttaaaccagccgtcttttatctcgcatatcgtggtgggtgcgcttagtgagatttcgtcgagtttgtcctgaccgtatactaccatgccgcgcttgattcccagattgatcaggacctgagcgaggggttcgacgagatagccgtcatagacgccgagaagctgcgtcgtgggaactgcgggattggtgagcggccccagaatattgaatacggtgcggaatcccagctctttgcggatcgcacctacatatttcatggaagtgtgatacttctgtgcgaagaaaaagcatatcccggccgtattcagaagctctatgcatttcgccggactctgcagaatatttactcccagcgcttcaaggcagtctgcggttccgcatttcgaggacgcggcgcggtttccgtgttttgcgactttcattcctccggctgcggcgacgagagcggaagtagtggaaatgttgaagctgtgggcgttatctccgccggtgccgacgatttcgaagagttccatatcggtctttaccctgacggaatgcgcccgcattgcggccgcgcagcctgcgatctcatcggtggtctccgctcttgcgctttttgtggagagcgcggcgagaaaggccgcgttctgtgtaggagtcgtcttgccgctcatgatttcattcattacggtatacgcttcgtcataggtgagatcttctttgtttacgattttaacgatcgcttcttttatcatttttctgtctccttttcatcatggtacagggcgctccggtttttcgggtttccgcaggagggtatatttccctccggattccggaaatgaaattctctgtctatagagacgggcggcgccggcactgcgttataaagttaccgagcattgtttttccgtgcggcgtcatgacagattcgggatgaaactgtacaccgtagacagggtagtctctgtgctggactgccatgatttctccgtctgatgcgaccgctgtaattttcaggcattcgggaatcgtatcagcttttgccgcgagagaatgatagcgggcggccggagcgttctccggacatccccggaacaggggacattcggtgtcgaattttacatcggatgtttttccgtgcatcagtttccctgcgtaagagatcactgcgccgaatgcggcgcagacggcctgatgacccaggcagacgccgaggatggggattttctctcccagggcggttacgatttctgtgataatgccggcttcttccggtcttccggggccgggagagagaatgatctgatcgggcgccaaccgggcgatttcctctatcgtcatctcatcattgcggatcaccctgatatcgggttcaatttctccgatgagctggtagagattataggaaaaactgtcataattatcgatgagcaaaatcatatactttcctcctccgcaagctccagtgcgttcatcacggctttcgccttattgatgcattcttcgtattctctttcgggaacggaatccgcgacgataccggctccggatctcacgaagacttttccgttctttttgtaagcgatgcggattccgatgcaggtgtccatattgccggtgaaatcgatatatcccacagcaccgccgtagatgcctcttttattattttccagttcgccgatcagctggcaggcgcggatcttcggtgcaccggaaagcgtacctgcgggaagtaccgcttcgacggcgtccagcgcgtcgttttcttcgcggatttccccgcgtacggtagagccgatgtgcatgacgtgggagaaacgctcgataaaatgaagcttttctacctgcactgaaccgaatttactgattttccccagatcgtttctgcccagatctaccagcatgttgtgctcggccagttccttttcgtcggtaagcagttcttcttccatgagccggtcttcttcgtcagtgcgtccccgcgggcgggttccggccagagggaatgtgtgcaggacgccgtcctggagctttaccagggtttcgggagaagctcccgcggcttctacgtccgtaccggaaaaatagaacatgtagggggacggattgatagtgcgcaggatccggtaagtgttcagcaggctgccttcaaagggagcgctcaggcggttggagagtacgatctgaaaaatatctccttcccggatatgatgtttggctttttccaccatggcgcagaactgttctctgtcgaacagaggagttattttacccagcaggcggccgccgggttcctgttttttctcacctgtccggatgagttcctcgagccgtctgagctccagaaccgccttgttatatccgacctcgatgtcgtcgagaggcatattcacgatgaggatcagcttctggcgaagattatcgaaagcgatgattttgtcgaacagcatcagatccacatctttgaaattctccgtatcttccgcgctgccgcggacagccggttctctgtatcccaggtattcgtaagagaaatagcctgtgagacctcctgtaaaaggggggagataatcaaagcgggggcttttataatcagcgagaatctgacggagatattcggagggattttcagtttggaacctgagacttccgatctgcatctggccgtcagtgcatgtgatttccagcttcgggtcgaagccgagaaacgtatagcgtccccattttctgtcggcccacgcggattccagcataaagcagtgagtcgatacattcttcagaatcttcatcgtctcgataggggtagtgaaatctgataaaatttcacagctgaccggcagaacgtcaaattttccggtggcagcgattttttttgcctcgccgaggctcggtgcgattttcatgacgttacctccttaaaatagaaaaactcctctgacttgtttctgttagaggagtttgcaaaaagaaaaacgcccctgacagaatatgcgatctgtcaaggacgaataatgtgccgattgaagtgcggcgttatccgcggtgccaccctgatttcgcaggaacgaccctgcgcgcttagcgggatacctgcatatccccggcaactgacgtatgccaacacgttgcagaatactctgtgagtctggaattcacatttgactgcaccctccgcggtccatttgacaacttgtttcttgcctgattctcagcatcgcaggctctctgtaaaggcatcattgccgttatctccgcttcaacggtttatttattattgatttttttcgattgtaactccgctctgtgcgcttgtcaacaaatatcataaacttttgttgaaaaaaacaatatcgaaacaccaattgacgcattgacggcgggatgcagatatattccgcagattatgcgggagcagcgtcaagtatatgttctgatgatgttctcagagacttcccgttttgtgatacactgatccatagcctgtttttcaatatagcggtgtgcgttaggttcatccattttcagctcgctgatgagaatccatttcgctttgtttacgatacgaatttccgccatcttttcttcgatggacagagttttcttttcaaattttctcagccgttcccgggcgctgacgagccagctcagcgccatgatgatcgagggctttgcggtaggtttcggaagtgtaaaaacaccgtgttccgctactttgtcgtaaatctctccgtggagttccgaccggactaaaaacaggacgacggtacccggcagatgtgaggtgtcgatagcgaaccggatgcccgcatcgtccggcagaggagagtttatgatgacgaggtcaaaagtgtattccgctgtgatctgttttgcagagctgatactggagacagtgcgcaccgggctgtatttcgattcggggagtaaagcggcaagcgccgtgttgaatttttctgccgccgagataatcaggacgctgtagatccttttttcgagacccatgatctcccctccttttttcatcgatcggattttttaccacagtagacttctaagaccgcggcagggatgtgtttccggataaaatcgctggaaaacgccgccgcgcgggcggcggccagatctttcggaagtctgcagaagttcgtcagcatcttttcatccgccgtatacaggttgatatcggccggttcgggtaaatccaaacgattttcgagaccgtaaagccccgcatagatcataagcgcgaaggcgagatacggatttgcctccggatcgggagaacggagctcggcgcggcggtattctccttcggctgcagggatgcgcaccagctgagaacgattttccctggaccaggaaacatagatcggcgctttgtagctgccgaatcgcgcataggagttttccgaagggtttagaaatgccgtcatttcacatgttttttgcaggattccggcgatcatgcggtgaaatggatcagaactttcgtcggatttgacggaaatatttatatgaaaaccgtttcccggttcattcttgaggggttttgcactgaaatcagcgtagaggccgttctggcgggaaaccgtttttacgacagtctggaaagtcatggcgttatcggctgcggttagagggtcggaatagcggatgtcgatctcgttctgccccggtccttcttcgtggtgagagctttccggacgaattcccatctgttccagagtgagacagatctcacggcggatattttctcctttgtcttcgggtgcgatgtccatatagcccgcttcgtcatacggtatcttggtcggatttcctgcttcattgagtttaaacagataaaattcctgctcggcgctgaaagcgaaccgatagccggattgcccggcatcctgaacggcttttttcagcaggctgcgcgtgtcgcattcgaagggacttccgtccggataggagatgctgcagagcatccgtaccacgcggccgtgttcgggtctccacggaaggggcatcagcgtttccgcttccgggtgaagcaggagatcggaatgagtctcatcgccgaagcccgcgatcgacgaggcgtcaatcgcgatgccgtattcaaaagcgcgggaaagttcttccgacatgatggaaatattcttctgcctgccgaatacgtcgcagaaggcaagacggataaattttacatcttcttcgcagatatactgcatgacttcttctcttgaatacttcattctatcctacctactttctttttaatttgccacatacatctgtgtatacgggtttttgctgtcgggcgtcaccaccgtaaatggggcggataatatctcgttcacatcgtatccgaacagatcgcagaattcggacacataaggcttcaattcttccagatctttcgagccggccggccgggccgtaacctgatccgggaattttatatctctgcagtcggagcgcaggaacattttgcccccgtgcatcccggtgcagggaaaaaatccgacgattctgtcgtctttcgcttcgagaccgaggacgacgataaggccgccggcctggtattcgccgagaaaacttcctgcagtcccgccgataatcatcacggggattttccctttatattctttcatatggatgccggcgcggtatcccgcattgcctctgacaaagatctttcctccgcgcatagcataacctgcggcgtcgccgatgctccccttcacgatgatttttccttcattcatcgtatcgccgacggcatcctgcgcattggcgttgactgtgagacatgcgccgttcaggtatgcgccgagagcatttccggcgatcccttcgatggcgatatctttgtctgacattcccgcagcgataaaacgctggccgcagcatccggtcagtgtaaagcgccgttcgtctttgcggagcgcatcgtttaattccttatgactaaggttagcagcatctattttcataatactatatcacacctccaaagtatttccgtgcaatttggggaaaaagatatcgattatctgcaaatatcgcttcgtattatcgttctcccgcatgaaaaattccgaggatttccagttctttgtcggtcagtccgatgccccggagcatcagacggttgccgcgcagcgcttcgatagagttgattcccatgcctcccatcagttccttgatttcgtaccgccacgcattcatcagatggatcaggcgacggcttcctgtatcgggatcgaggcgtcttaccagttccggctgctgtgttgctatgccccagttgcattttccgctctggcaggttcggcagagatggcagccgagagctaagagcgcggcggtggcgatgtaacaggcatccgcacccagagcgaccgctttgaccacgtccgccgcggagcgaatcgagcctccggcgacaagagagatattgtttcggataccttcatcccgaagccgctgatctactgcggcgagggcgagttccacagggatgccgacattatcgcgtatccgggtcggcgctgcgcctgtgccgccgcggaaaccgtcgacggcgatgatgtcggcgccgcttctggcgatgccgctggcgatcgccgcgatattgtgaacggctgcgacttttacgatgaccggttttttgtactctgtagcttccttcagggaaaataccagctgccttaggtcttcgatggaatagatatcgtgatgcggcgccggtgaaattgcatcggagccttccggaatcattctggtgcgggacacgtctccgatgatcttcgcaccgggaagatggccgccgatgccgggttttgctccctgacccattttgatctcaatcgccgcgccggcgttgagataatcctcataaaccccgaatcgtccggaagccacttgaacgatcgtgtcttcgccatagcagtagaagtcttcgtgcagacctccttcaccggtattatacagaatgccgagttccgatgcggcgcgtgccagagaggcgtgggcgttgtagctgatagatccgtaactcatggcggagaacatgacgggcatggataattcgatctgaggcggcaggcagcattttaatctgccattttcatcgcgctgaattttctccggcttttttccgagaaatacccgggtttccatgggctcgcggagaggatcgatgggcggatttgtcacctgagaggcgttgatcagaattttgtcccagtataccggcatcggcttcggattgcccatggaggacagaagcacgccgccgctgcctgcctgcttgtagatttcctttatcgtgtcgttctgccagttcgcgtttgcccgcagcgtgcagtcactttttacgatcttcagcgctctggtcgggcagaaagatacgcagcgctggcagtttacacactttgtttcatcttctgttaaaatatttttttttgcatcgtagcgatgcacaccgttggcgcattgctgttcacagactctgcagccgatacagcggctgtcgctgcgaatcacttcaaattcgggatatataaattctatactcatcagtacgcaccgtcctttacttgaatgataacaggttcgccgcctgcgggcgcccagatattttccgcgtccggttccatcgcgcggatcgccgcttcttcgctggcgataaatactttatcgtctttttcgccgaccaccatggaacgaagcttcagacggtcgttcagggccatcaggccgccgctgtagccgaggacgatagaaaacggaccggtgatcagaaggctcgggaaaagagtgcgcaggtagatatgtttctctttgtcttcgagatcggttttctcttcaatcgtgctccaaaacggtgcggctgtcacgctggcggcttctccgagagtcagtccctgtacgcggatgaggtaatccataatataggtgatgacttcggtgtcggtctgcagcgtgcatttatatccgaacatttcgatgaagcggcggttggcgtcgtaggatgaaatttcaccgttatgaacgacggaataatcgagcagcgtaaacggatgcgcgcctccccaccagccgggcgtattcgtagggtaacggccgtgtgccgtccaggaataggcctcgtattcttccagtctgtaaaaaacgcctacgtcttcaggaaatcctaccgctttaaacgtccccatatttttgccgctggaaaatacgtaggctcccttcatttcagcgttgattttcatgacggtacgggctacaaattctttttcatccagctgtgctgagatgagaacggattttaacggagcgacaaaatatctccagataatcggttcgtcggtgatcgccggaattttgcgggttggaataatttccgactggacgatttcgaagtgttcctttaaaaatgcttcgcagttttttcgcgtagtccgttcatcgaaaaacatgtgcagcgcatagaaatctttatattggggatagattccgtatcctgcgaatcctccgcccagtccgttggaacggtcgtgcatcggtctcatcgcatcggtgattttctcgccggacattttatttccttctctggagataacggcggcgatagcgcagccggaggggattcgtacctgaccttctattttcatattgtttcctttcctttcagagagatcgaaaaaagaaaagacgctcatttcggtacagaacggactgtactgaaatgaacgcctttgctcatttgtcagtaatatacaccgaggtctgcgttttgtcaagaataaaacactggaatttgaagaccggcagaatgggaaagaaaaaatgaaaaagggggttgacaaaatccgcctgacaggtgtttaatacaagaagcgaaggcaacggcgtctttgagtggtgagctcaaagacgttttttgctttttggaaatgaattccgaaggcggcggatccgcacgcgagtcgtaaaatccggcgaggtctccgaagcaggtgcgttgagaaacgctgccgtcccggtgaaaaaagaaaaaggattggtaaagcgaagaaaggcaaaggcgtctttcatgttgttgatatacatgaaagacgcctttgtcttttttatcagagaaaaaggagaaaaaattatgggaactgtatcagaatatttcggcagtctggtttttgacgacagagtgatgaaagcaactctatccaaagaggtctatgattctctgaagacgacgatcgacgagggcacagagctggatatcggcgttgccaatgcggtggcggctgcgatgaaggactgggcggtcgccagaggagcgacacatttcacacattggtttcagcctcttaccggaattacggcggaaaagcacgacagctttatttcaccgtctccggacggcggagtgattatggaattctcaggaaaagaactcatcaaaggggaaccggacgcatcttcctttcccagcggcggtctgcgtgcgacttttgaagcgaggggctatactgcgtgggatccgacttcctatgcctttatcaagggaaaaactctctgtattcctacggcattctgttcttacggcgggcatgcgctggataaaaagacgcctctgcttcgttcgatggaggcgctcaacagacaggcgctgcgcattctccgcctgttcggcaatgataccgcaaaatgtgtccgttcttccgtaggtccggaacaggaatatttcctcataacgaaggaaatgtacgatcagcgccccgatctgcgatttaccggccgcacgctgttcggtgcgaagccgcccaaagggcaggagatggatgatcactatttcggcgtgattaagccgcgggtggcggcatttatgaaagagctggatgacgagctgtggaaactggggattctggcaaagacagaacacaacgaagtcgctcccgcccagcatgagctggcgcctgtctataccacgacaaatatcgcgacagatcataatcagctgacgatggaaattatgcagaaggtggcggccaaacacggcctcgtgtgtctgctccatgaaaaacctttcgcgggagtgaacggcagcggcaaacacaataactggtccatcgcttccgatacgggtcagaatctgctttctcccggagagactccttatgaaaacgcccagttcctcctgtttttgtgcgcggtaatcaaggcggtggacgattatcaggatctgctgcgcatttctgtagccaccgcgggaaacgatcaccggctgggagcgaatgaagcgcctcccgctgtggtttccgtctttctcggagacgaattgaatgcggtactcgaggcgattgaaaacgacgccccataccgggaaacggagaagacgcagatgaagctcggcgtcgatgtgctcccgaaattcaaccgcgatactaccgaccgcaacagaacttcgcctttcgcttttaccggcaataagttcgagttccgcatgctgggatcctccaacagtatcgcctgcgccaatatcatgctgaacagcgctgtagctgaaagtctcagaatttatgctgaccgtttggaacaggcggaggattttgaaagtgcgcttcatgagatgattcaaaaaacgatccgggatcacaaacgtatcatttttaacggcaatggatatgacgaaagctggatcaaggaagcggttgaaaaacgcggacttttaaacttgcgtactacaccggatgcagtgcctcatatccttgataagaagaatgtcgatatgctgacgcttcacggtgtattttccgaggcggagatccgatcccgctacgagatcacactggataattactgtaagacggtgagaattgaggcgaatacgatggcggacatggccaagacacagattgctcctgcggtcgaggcctatgccgcagatgtggcgagagctgcggctgcaaagaaaagtctcgttccggatatcagctgcgcttatgaaatcgggctggtgaagaagctctccgctctgacggatcgtatttcggtacaggcggaaaaattggaagaggctctcatggcgcttcacggaaccgaggatgtggcggtggaatccgcggtcatacgcgataccgttctcaccgggatgagtgagctgagagtcgcctgcgatgaggcggagactcttacagctaagagttactggccgtttccgatatatgcggatctgctgttcggggtcaggtagaagaaaaggagaaaggtatgcggtttacaaaaatgcacggtctgggcaacgattatctgtatgtttacggcccggtaccggaaaatatcggggaattgtctgtaaagctgtccgaccgccacttcggcgcaggttcggacggaatgatttatatttctccatcggagagagccgattttaaaatgcgtatcttcaacgccgacggaagcgaagcgaaaatgtgcggaaacggtatacgctgtgtgggaaagtatgtttttgacaaggggtatacgaacagaactcatctgaggatcgaaactctgtccggactcagagaactggacctgcagattgcggggggcaaggtaaaaagcgtgatcgtcggcatggggaaagctgcggtgggggatgatatcgctttccgcgcgggagacgcggatatcgtatgcacgcctgtgtccgtgggaaatccccacgcggtcatctttgccgatgacgtcgaagaaattcctctgaccgtgctgggtccgcagatcgaacatcacgagaattttcccggaggggtgaatgtggagttcgttcaggttctctctgaaaaagagctgcgcatgcgcgtatgggagcggggcagcggtgtaacgatggcatgcgggaccggagcgtgcgccagtgcggcagcggctgcagcgagggggtactgtgaatatgatactccggtgtcggttcacctggacggaggaacactgaagattcagatcgcccgaaacggagccgtgaccatggccggtccggcggaaattgtttatgaaggagagattgcgatatgattactcccaatatgcattatgcggatttaaaggattcttatctgttctacaacatcgctcagaagacgaaagcgtatcttgaagcgaatccgtcagagcatctgtgccgcatggggatcggtgatgtatccctgccgctctgcgatgccgtgatccgcgctttacatgaggccgtcgatgatcaggcggcgccggaacgttttcacggctatatgccggaatgcggagcgccgtttctgagggaggcggtcgccggctattatgagagaaggggggtcgtgctttctgccgacgaaatcttcgtatccagcggagccagtgatgaactcggcgatatcctcgatttgttcgacaggaaaagcagcgctctggtcatcgaaccggcgtatcctgcttatgtggacgctaacgtgatggcggggagaaaaatcgttcgcctgacttccggagaggaaaacggattcctgccggaaccgcgggaggacatcgaagcggatctcctctacatctgttcgccgaacaatcctaccggtgcggttttcagccgtgatcagcttcaggcatgggtggattttgcaaatcgaaagggttcgattatcctgtttgacgctgcctatgaggcttttatagaggatgaaactctgccgcacagtatttttgagatagacggagcgaaaacctgtgctgttgagatttgttctctctccaaaacggcgggattcaccggaacacggctgggctataccgtcgtgccgaaggagctggagcggagcggtatgaatctgcatgatatgtggatgcgcaatcgcacgactaagacaaacggcgtctcttatatcatccagaaaggtgcagcggctgtcttcacaccggagggacagcggcagattcatgagaatatcggagtatacaagaaaaatgcaaaggtactgatggatgcgctggatcagctgggaatctggtactgcggaggaaaaaatgctccgtatatctggatgagatgtccggggaacatggacagctgggaattttttgattatctgttaaacgaagcacagattataggcacgccgggagagggctttggtgcatgcggtcagggatatttccggttttcctctttcggaagtccggaggatacgcgcgaagcggcgcagcgtctgatcagactgctggaaaaataggaacgcagagaaagaagtgataaagatgcgtgattataaggaagaatttgaaaacagagtgcagtttatcaggtctgtattggcagacagcggcgcagaaggcatcgtgtacggcaatagcggaggaaaggattccgccttaaccggtattctctgcaaggccgcctgtgaaaatacgacgggcatcattctgccgtgtacggcgaaacgcaattacactcaggatgcggcggatgcccggaccgttgcggaagagtatggcatcgagatacgcacggtggatctgacgccggtcaaagaagcggaaatccgcgctctgcaggaggtgactccgctgaatgaggctgcgctgtccaatatggcgccccgcctcagaatgctgactctgtatgcggtggccgcagcggaaaacagactggtggcgggtacaggcaatcggagtgaggcttatgtgggctacttcacaaaatggggtgacggtgcttatgatttcaatcccatcggcgatctgaccgtcaccgaagtttatgaatttctcaggtatttaaatgccccgggatgtgtcatcgacaaggccccttccgcagccctgtttgacggtcagacggatgaagcggagatgggaatgacctatgcggaactggattcctatcttttgggaggaacgattgcagaggacaaaaagcagatcgctgatcggatgcatcgaaagagcgaacataagagaagcggggttcgttctttcgccggcggccagaggatggagcgataaaaacaggcgaatctgccggtctgtacagacaagacttcgatagacaagtgaaagaataaaacagacgccgacggtgaattcgacggaaaggacgcagcgtttcgcggatatcttctgccggcgtgaataaagttgatattggtaaaaagtatggaaaaagcccctttctgaccggccttctatcgttagattttcggatctgacgcgggagccggttcggaaggggcgtttatgttttctgtcgacggtagttcctctatatcagcagacggatattttttccgtccccttcgatgagtccgtcttttttcatgtgtttcagctcccgcgtcatggcgctgcggtctacgcacagatagtcggccagggtggtcatactgtacggcaactgaaaatcatttgtgccgataactgcggagagctggtaaaaataattgaccagtttttcgcggatcgttctctggctgagaatattcactctcgcgctcagcgtgctcgtctttttggacatgagctccagcagattcgaaatcagcgcggtatggcagctgcaggcgttttcgcactgcctctgaatgtgttcgttggggataaaggcgattttggcgggcttgagacactttgcggtaatggtgtcattttcttcgggcgtataggaatacagccgcccaaacatttcatttttttcgatgatttccagaatgctttttcttccgttgaaatcaatccgtgagatttccacggatccgctgagcacgataccgatgtcatgatggtaatattttcggatgtccagctcctgttctccattcagcgacacgaaagaggtctggaagcagctcatcatgcgccggcagtcctgatcggtgatgtggtcgaaaagtgggatctcagaaaaattcataaaaacctcctgcactgttgcatatgcaacagcttatctgtgatattatggtatcataaaaacagctgaaagagagcaatattatgaaaatttaccccggtttgtaggagattcgcatctgtttttttccggatcgtatgctataatatggggaagataccgcagaagcggaaaagatgggaaaattatatttaacgttgaaaggagataagaattatggctaagtttgtatgtcaggtatgcggttacgttcacgagggcgatcaggctccggaaaaatgtccggtatgcggagttcctgcagaaaagttcaaggaaatgaagggcgaaatggaatgggccgcagagcatgtggtaggcgttgcaaaggatgtagatgaagatatcaaggctgatctgagagccaacttcgaaggcgaatgtacagaagtgggcatgtatctggctatggcgagagtcgctcacagagaaggttatcctgaaatcggtctctactgggagaaggcagcatgggaagaagcagagcatgctgcgaagttcgctgaactgctgggcgaagtagtaactgacagcacgaagaagaatctggaactgcgcgtggaagcggaatacggcgctacagcaggtaagacagatctggcagtcagagcaaagaaagcaaatctggatgcgatccacgatactgttcacgaaatggcaagagatgaagcgagacacggtaaggcgctgaaggggttactcgaaagatacttcggataagtcgtctgtcggctcatcgcattctgcggaaggggaaaccggaaacgggttccccttcttcgtcgtttttgacaaaatattcagcttcgatttgtgtcgttttttggcgatatttgtacaacagccttgattgaaggggtgatttttcagatgttaaaatttattgcacaaggaggttgatatgaaaaactacggcaggttctttaacgaaagaaatgaaaaacacaaattgaccgccgtcattctcttaactgcagggattataacttttgttgctgtactgcacacggttcgcgtgattatccgtgaatcgggaggtgcgctggaaagggacgcgcagatcgtggcaagcctctttagtttatgcggtatcattttgctgacggctttgattttattctttgtctggaatgtccggatcgcggcaaaatttgaaatctgcagaatgggagcggagctggaccgggaaaaaatcgccaatcaggccaaaagtgattttctgtccggcatgtctcacgagcttcgaacgccgatgaacgctatcgtgggactgacgacactggccagaagatctgtgggagatgaacagaagacgacgatgtatctgcggaaattggaaatttccacgtcatatatgttgtctctgatcaacgatatccttgagatgtccagaattgaaaggggaaaaatgacgctctaccagattcctttcgatttttatgaggttgtggaagcggtagacgcgatgatgtgtcagatcagcggtgaaaaacagcagcattttgaaatggatatcagagtagaacatcatcagattatcggggataaagtacggctccagcagatcatcataaatctgctgaataatgcggtgaaatataccggcacagggggacggatccgtttggaaatcgaggaacggaagatggaagacggaaaggtatggctgtatgtagaagtttctgatacgggaatcggcatccgtccggaagatcaggagcggatctttgaaccgtttgaagaggcggagggaaaagagcggggcgatgcgtttgccgccggaggaacaggtctgggactcagtatctgccgcgatcttctccgtcggatgggcagcgagattcacgtgcagagtgtgccgaatcaaggatctgttttttcttttgaagcggcatttgaatgtgcggagagcgaactttttccggaggatgaaatcccgcaggggacctgggatttgagcggaagacgttttctggtagctgaggacaatgaaatgaatcggaatatgctgatcgacctgctgatggacgaaggggtggaatgcgatcctgcggaggacggactggaggctcttcagatgtttgaaaaatcgaagcccggtacttatgacgcggtgttgatggatattcagatgccgcggatggacggtctgaaagccacgtcgaaaatccggacttccgctcacgctgatgcggcggtggttccggtggtggccatgtcggcctacgcttttaccgaggacatcgaaaaaagccggcaggcggggatggatgaatatattacgaaaccgattaatattgtcgaattgtgcaaattgctgaatcatctcattgcattgcacgcgaaaggggcttgattttccggctgattatgcaaatgcataaaaaacacataaatattttaaattttagcatttaactttcaaatgattagtgttagaataaggtgaaactattttttatcgagagaaaaataatttatagggggaatttgaaatgcagggtaatgcaggtgatatgaaatatctggcggtattctatgatatgatgcgcaagtatcaggagtcctgtaaggagagtctgggcgactacagttttactccgaatgaaacgtctatgatgatttttatgctggaacatccggaggtggatacggcgaaggaaatcgccgtaaatctggggatttctcagtcgctgatctgccgttccgtggattctctgacgaggaaaggatttctgagcacagaaaaggacaagaaggaccgcagagtgaatcatctcacgctcaatatcgaggacaaggagctggagcagaccctcggcaaaatgaagcgcaattttcttgaacggatgacagacggcgtaacggaagacgagctgaccgtatttcagcaggtcgtcgataaaatggcggacaatatcggtatccgtaccgatcgtctcggctgaaaaagcagacagctgtaccgacagaagaaatcattcttctggatcgcgtacggctgtttttattttttgcgcggaatttcggcgcggcggtatctttgcaatggcgtcagatttgccggcgggctgcgggaagagcggcattctgcccgagaaaagttccaaaaggaacaggagcgcggcggcgtacatatattgacagagtaagcagcaatccgtgtcagcaagagtctcagtttgtatcggaaaatgaggtgaaaaccatgtcagtcaaagagtacagtctgaaacgggacggcgaccaaaaagtatccgccgattttcgcgtcagagagtttcgctgcaaagacggcagcgataaaatccttctgtcgccggagacggtgaaaattatccagtccgtccgggattatttcggaaaaccggtgacgatcaattcggcttaccggactcctcagtacaataagaaagttggcggcgcttccaactctcagcatgtcaaaggcaccgcctgcgatatcgctgtgaaggatgtgcctccgaaagcagtggccgcttatctggaggctttttttccaaagacgggaatcggcctttacggaagttttgtccatgtggataccagaggttacgcagtccgctggaaaaataccggcagcaatacagtgaaagctttcgggctcggaaaaatttatgaaaaatatcgtgcgcaaaagaatgagaataacgaaaacgatggaaaagaggaagaggaaatgacacaggcacagtttgataaaatgttagataattatttcgccagactggcagaaaaaaagcccaacgactggtcggaagaggacagaaaatgggccgaggaaaataagattatccaaggcgatcccgacggcagtaaaagatacggttctttcatcaccagagaagaagcggcggctatgattcacagggccgtggagaagctggaagaaaaaaaataaaacgtttttcaccgatgtgacggcgttttctgaaatatggcctgtccttaatcgcgctgtgatgtaacgcttccgttttcagatatccagcgaagaaagcggagagaatgacgagaccggacccgatcctcggatttgaagagggatcagatttaagttctgatccggtgaaaatcggagatgcgggcccggtcttttttgcggccggctgcggctctaagagggatatttcagatgcagcagctcttcattgagaccttcggcgtaggaaatctgacggatggtaaatccttcgtagcggtagatcagatcgtccggcaccaaaagttccgcggcaaagcgattggcttccttttctgtttttgaggtgagaagcagcgttttgttccggataaaataacagttttgtttccggtgaagcaccgcgtgacctaattcgtgtgccatcaccattgtgcgttcgttatccggcagttcctgattcagaaagatataccggtgatttttcagaaacatataacagccgtcgcagcccggacttccgatttgtacttctatatttaacgcttcggcaatttcaaaagggttgcgggtctgatatttttttatgagccgctgaacggtccggcagataatatcgttcaaatgatacacctcttttcgggtgaatatttccatattatatattcgacagggatatcagattcttctccggaaggagtcccggcaggtgagattccggccttttgggatcccgtcgggtgtccggtcatttggacggccttccgcctgatctgccgtccgcagatgcggaaattcggcgctgcattatgaattctcaagccctgtcagggtttttatcagttttgtttttatatggattgtacttttctttatttatgattttaagtcttttcagagcgatttccagttcttcgcggaaaagttccgctgattccggggataggggttcaccgtcatagctggcgggaccatcttctcctaaagaaagtttttccataatattgttgagatctcttgcgatatcttttctgtctctttcgctgaggctgctgttttcgcttttctctccttttgtcagatattcgatgggaacggaaaaataatccgcgagtttctgcagaatcgccatactgggcgagctggtcttccattttgaagaagcgccgttgctgatgccgatatctttttccatttttccctgtgtaacgcccttttctttgcataggtgtttgactcgttcaagtaatgtcatggtcgcctccataaaatgtaaaaactttcagtaaacttgttgacaaacagaaaactttcagtataatgaaaaatgaaaacggaaagaattcagcaaaatacaacaagaaacgagtgattttgtaaaatattcagttaattaggtaaatcaatcatagaatattttcagcgctctgtcaatgcgattgttggattttagtggaaaggaggttgaatgatgaaaggcatcacagagattttaaaaaatctcagaaaaatacgttcggagatggagggactggaacttctgattgaggatatatcgaagacgacggtaacagacgtcgtttcggggtcctcctgcgaatttccttataccgccaggcggttttccatcaccggcgtggatatggagaggctgaacgaagtgacgctgaaactggtaaagaaacggtcggaatatgcggcgcagctggaacaggcggaaagatttctggaggatgttccggatccggagatgcggaatattcttcggctcagatatgagctgggaatgtcctgggtgaagatcggatttaaatgtgacagcacggaaagcgctgtccgtatgaaggcggaaagatttttaaataaaatggagcagtgttcaacatgttcgtttgaaagatgctaacatggtatttgtcagaagtggatgacaagcgaatctttttcaaatctcttttggacatcggaaacggataccggcaaaaccctgctgcatttgcggcagggtttttattatcggcgaaagggggagatcggatgggctaaataagaaaaacaccggtcggagggagtatctccgccggaaaagaacgacgggaaaggaaggattaggtaatggtaaatgaaattataacgggcgtatcggaaaagatacagtcttctttcggtgaagggtatcccgtttaccggaatgagcgggatcgaggtgaggacagtccctgttttatcgtttctgtacgatctccttcagtgattatgtatgttgggggacgcagaaagatgaccgtcccgttggacgtcggctattttccggcggaagccggcagcagcgaggagatgctcgatacggcggagaagctgctggacgccttggaatatattgcgctgaaagaagaaaacagcggcctgcggggcagcgctgtcagctgggagatcgctgaaggaatgcttcatttctatatcacgtactgcgcgcttcagaaaaaaagcgcagatcttgtctatatggaaggagcggagataaccgcaggaacgtcaaaagaccggccgggcacggacgagtgaggagtccgtgaaattcgcggaaacagtaaagtttgaagaagaaaagcattctgacattaaaaagatattacagcagccggaatctgctgacagcgctgtggaatgaaggatagatctgttctgtcggaagacggaaagcagaaccggcggatttatgagaggagtgaactaattatggcacttggaggcggaacatggcttacacagagtaaggttcttccgggaagttatatcaattttgtatctgcggcaaaagcgtccgcggcattatccgatcggggtacggtgacgatgcctgtggaattgagctggggaccggaggaccaggtctttacggtagagagcggagatttccagaaaaactctcaggagattttcggatatgcgtataccgatgaaaggatgcagatgatgcgggaaattttttcccatgcgaagacggcgcatttttaccgcgtcaacagcggcggcgtaaaggcgtccaataaatttgccagcgcccgttacagcggtacgagaggcaatgatcttaagatcgtaatcacaaaaaatgagaattacgcagaggagaccaataaagtttacgatgtcgccacttatctgggaacttcctgcgtcgattttcaacagggcgtacaggagatgggggatctcagagacaattcgtatgtcaccttcctgtcttccgcttcgctggaacctaccgcttctcttccgctgaccggcggtacggacggaagcaccgatgacggcggatatcagaaatatctggacaagattgaatcttattctttcaatacgatgggatgcgcctgcacagaagaaacggttaaagcattgttcgcggcgtttacaaagaggatgagagaggagaacggcgtaaagtttcagacggtgctcttccgttatacaaaagcggatcatgagggcgtcatctcggtggaaaacggacttgcagccgctaaagacgacgcgtcgctggtgtattggaccgctggagcagaagcggcgtgtgaggtgaatcgaagtcttacgaacgtcacctatgacggtgaactggatgtagacgccgaatatacgcagacgcagttggaagaggcgataaagagcggaaaactgattttccacaaggtcaacgatgagattcgtctgctgacagatatcaacacctttgtaagtgtcaccgatgagaaatcggcggacttttccagcaatcagacggttcgtgtactggaccagatcggcaacgatatcgcagctctgttcaaccggaagtatctgggcaaagtacccaatgatgaagcaggaaggatcagtctttggaacgacatcgtaaaacatcacgagcagcttcagagtattcgagcaatcgagggattttcaagcagcaatgtgacggtggaaatcggcgatacaaaaaaatccgttttggtcaccgattatgtgacgccggtcaatgcgatggaacagctttatatgacagtgattgtccagtagaaaggagaaagtgagtattatggcaaatgttatgacagcgaaggacgcggtatccggttctctggctgagtgtttcgttacagtgaatgatgagcgctataattttatgcagctcatcaattttgaagcgaagtggacgatgaacatctcggaaattccgattctgggaaaggtctccaagggacataagccttccggaggcagcggtgaattttccggaacgatgcacttcaaccagtcggtgatgagggagctcatgcttcattacaagaatacaggggaagtgttctattttgatgttcaggttactaatgaagatcctacgtcagcagtgggacgtcagactgttattctcagagactgcctgatcgaaggagggattctggcgaaatttgacgctgatgcggaatatctggatgaagaaatttccggtacttttgaagattgggacatgcctgagaaattcagcggtctcgacggtatgcagtaaggagtgaaggatgagtatgacactgaccgcatttttagcggaaaacgcagatcagattgaaaacgaaaaatatgtcgtctctccccgttttcggggagaggacgggcagccgatcccttgggagatccgctgcatctccagcgcggaggatgaggctctgaggaagagctgtacgaagagagttcctgttccgggaaagaagaatcagtttacgatggagacggattttaaccagtatcttggaaagcttgcggctgcctgcacggtatatccgaatcttaacgatacggttctgcaggacagctaccgggttatgggcgcggataatttgctcaaagccatgctcagcgccggagaatttgccgcattcgtagagaagctgcagcagatctgcggatttgacagcagtctgcaggatcaggtagacgaagcaaaaaactgatcgagggcggtgacagtgaagcgaattttgcatattactgcctgcacgaatttcacttgctgccgtccgattttctgcagctgccgcggagagaaaaggcatttatcatcgctgcaattcaagtgcgggcagagaatgaaagaaaaaaacagaaagaaatggaacgaaagtctgcgcggaggaggtgatgcgatatggcgacgatggaaacaactttcacactttacgacagagcatccgctccgctgagagagatcaaccgcacgatcagcgccgttatggaaaattatgagaatcttcaggcgaaaatggagtacagtatcgatccctccggtattcggaaaatgaatatggaactgtcgaaaaccggaaaggaatttctctctctcggagaaaatatccggatcgcctcgcaggaaatgcagaaaggcggattcggttccggaaaactggcgagcggtctaaaaaatctggcgtcgaaaatcgatgttgccggcgggattaaaaaagcagtggcgctttccgaccgcatgatggagaccagcagccggctgcgtctgacggtggaagacgaaggttctgtctctgaactggaaaacaagattatggcgtccgcacagcggtcccgaatggcgtacttcgatactgcggatgcagtggcggaattcagtcgtaaagcgggaagcgttttcggcggggataccgatcagatgatcgcttttgtggaacaggcaaacaaacagttcactttgggcggcgcatctgc

SEQ ID NO: 4622 - DNA, 17201 bp, Unknown
  16S sequences of unknown bacteria
aggattattccgacgtactcggcgcagccgggtacatagaggaagaacccctgttaccggtggcgtcgtatgtgccgccgatgtgtgatttagattactatagcattctctacataccaaactgcaatagtgattatttcgggatgtatatatgccataacacttaattatctcgtactattaacgtcaatagtggtaacaggtattatgcttgttttttcgcatcgtgcattgcagagattaaataatttatataatgaattcggtattcgtcagggtaaattatataatcgactttgggaacagatacaaaacagagaaatagcaagatttttgattccggaacgagcatcggagccgtatttgaatgaaagccaaagctttttaaatatgctgttgcgcactaaaaaaattgcaaattctacagaacttttttcgtcttttggaagtacgattatgatagttttggtttcttttatcgggggaacttatgtattaaaaggtatgtctacaatggctgatttactggcattgatcattgtaattccgacaatttcatcgaatttatttgctatacccaatgtgattgcaaattggaaatcacttgctggacaaagtaaaccgatcagtgaatttttgaaagaagaagttgacgaaaatgtaaagcaggaaattctagatgatgatattaaaatggtatctattaataatctagattttggatataccaaaaatgaaaatgttttaaaaaatgtctctttacagtttacctccggatattatgcttttgcaggtatgtcgggttgtgggaaaactacttttataaaaatattggcaaaattactgccttatgaaaaaggcgatatattcattaatcaacaaccgcttcataaaatagatagacaaaattattggcagcatatcagttatgcaagccaggacccagtgatattaattgatacattgttgtataacattacaatgagtgatcatgactatgatgtagaccgtttgaatgctgctataaaagatgcacaacttgaagattttttaaaagaacaacctgaaggcctgaagacgattatatcacctgatactatttcaaaaggagaagggcaacgaatcagcattgcgagaatattttatcgtaacacaaaggttttgttgttggacgagattacatctgggttagatccacaaagtgagataaaagtggttgaagcactgaaaaatcgcgcgaaagaagaaaatcaaattgtattatgtatatctcatagatcgcagcctttgcttatgtcagatgaagttatcttttttaaagacggagaagttgatgcaatcggaaaacatgagaggctttttgaaacaaacgaaaactataaaatgatgctgaaggcggtatctgaatgaaaaagagcggatataattttttttcaggtataagatcaacatggcgtcttcttaaacgccttacaggtaaaaaggcaaatgttgttctgctgcaaacggctatatttacgttcctaatttgttatcaaacactgtttcagccgtacatattaactgaaatatatgccgctttgggaaccggtgaacctcgcgcgctctttacggtatgcgcaatcggcggtagcattgtttcactgttttttttcctgagttatttaaataatgtatatttagatttatatagttttagaattaaactattaggcgtacaaaatgcgtgccgagagctgtttaaactgccttatgataaaataaatgatcaatttaatgcaaatgaactgatcaatcggattgatgctgcaacattgaatttcattacggttattatttctttagggttgataatatcgaatactataaatatagttgttctcttaagtatgttttcatcctattcctatattttaataattattgtcattttgcttgcaatatggggaggagtctccagtagaattgagataaaacttcgaaaaaaatatgagattgaataccaacgcttggaagatggcgcgggaggtatattatacaattctatacatgaaatagtttttacatcaatgtttggctgtacagagcgattatataatcgatacggaaaaatgcgaagcgatatttggaatacaaaatggaaacaagaaaagaccgcgttgtttgtttcgctgtgcacgtctatgttttcctcaatgcttcgtggatttttaagtggtgcattatattcgttacataaaaccggtttatttccagcgtataaagtcacctcttcattttcaatttatgatcagttaagtgctgtagtaagtaaatatgctagtccttttgtagagatcaatacgcacctggtaaacataaaaagattgaatgaggtaattgaattccagtatagtgaaccctctaaatgggaacctttagaaaataactgtttgataaaaggcgagaatctatattacggtatagataaaaaagttattttaaataatatttcattgaatataaaaagaggagaaaaaattgcgctgatcggtcgcagcggttgcggaaaatcgacacttttacgagtacttgccggtttgtatcatgtaaatagaggagacttaacgtttaattcaaagttcttgaatacatgtagggatatatcctatatacctgcttctgccatgctatatgatgatactgtagattcaaatatattaatgaacggtgacggaagcgttgaaaatgcattgaatttagccgagtttgatatggccgaacaaacgtgtgggttaccggcaactaacctttcaggcggtcaagcacagagagttaatatagctcgtggacttataaatgaggcaccgttattattggcagatgaacccgtttcttctctttcaatggcacaaggtgacattgtcatcaaaaatatagtaaatgagtcagaaaccgctatagttgttactcaccaccctactcatttgagatttttctcacatattatcttgatggaagatggggaaatagtggcttctggtactttagataaagtttccgctcaccctgcatacaaacgctggagtggaagagagacagataaaaatgcatccgagggggcgtaaatgtaaagtcgtattgacttgattacacgctctcgccaaacaataaataaaatcaaatgaaacatataatatatgtagctaattatccatcttacgcatcaaaagtaaaaacctgccgtaaaggaaatgatattataaaaataatctttaggcctgctttagtgcgaaatgatataattcgtacaaagtgaaaatgatacctacagaggggatgaatatatgcgcttgttattagcggaagatgatccgaaattactgaaatcgctgatacacatttttgaatcgaataaatttgcggtggatggcgtggataacggagcggatgcattggcatacgcccagtcgggcgagtatgacggacttgtgcttgatattatgatgcccggatttgacggtattgaagtgttaaagcgtttacgaaaagggggattgaccacaccggcgctgtttctcactgcccgtaccgaagtatcacagcgagtagaggggcttgatgcaggagcagatgattatttgccgaagccattttcaacttcggagttgcttgcccgtgttcgtgcaatgcttcgccgcaaggataattatgtgccggatttgctgacttataacgatgttgtacttaaccgttccacctatgagttaggatatgataataaaacacagactctcagcgggaaggaatttcagatagcggaaatgatgatgcaacagccgaacagcattatcgccaccgagcagttcattactcatatatggggctgggatagccatgtggatacgagcgtagtatgggtgcatatctctaatctgcgcaaaaaaatcgatgctgtaaatgctccgattgagatccgttttgttcgcaacgcaggttatatattggaggataaacaatgatttataacctgcggaagaagtttattatcatttcggctgttgcggtcagtgtggtttttgcgcttattttcggaatgatttatattgccagcacttcgcagctcaatcatacaatggatatgctgacaaatgtcatttcaaaaaatgacggagttttccctgattttaatgaattggaacgaccgcctgcacccgttggttttcaacaagaaaattttttcacccccgaaacacagttcagcacacgatttttcacggtttgggtagataataataatcaaattattcgtgaaaataccgacagaatatcgtctgttgataaagacgatgcccgggactatgcggaaaaggtgctgagcagcgggaatgaacggggttggatatccaattaccgataccgggtattggatacagagtatggaaaatcgttggtctttgtaaacggagagatgaacagagggatgaccaatcgtttactgtattcggtgttctttgctttagtcggtagctttatttttattttattgcttattgttattatatcgaagcgagccgtaaaacccgctgcggaaagttatgaaaaacaaaagcaattcgttaccgatgcaaatcatgaattaaaaacaccccttaccttgatactatctaatgtggacattgttgaatccgaaatcggtaaaaacgagtggcttgatgatattcgcagcgagggtgaacgtatgggtttacttatcaaccagctcgtgactctatcccgaatggacgaggacacctccaatcttgctgttgctgaatttgatttaagcaatatggcattcgatacggtttcggaatttgagggacttgcggcggaaaagaagaagcatctgatgaccgctatcgagccgtttattctttacaatggagacgaggggctgatccggaagctgatgtccatacttcttgataacgcgattaaatattgtgaccccgggggacagatttatataacggtgtattcgaaaggtcattccccggttatcacggtagaaaacacatacagcaatgtagataatgttgaactgggaaaactctttgacaggttttacagagcagacaaagcaagaacctttacgggtagctttggcgttggactttcgatagcgaaaggcattgccaaaaaccataagggggacattgttgcctacaggaaagactcgaatcatatcggcttcaaagtaacactaaagtaaatacagaataatactcaatggcaagaaaattgcggcatgatcgccggtttcttgccattttttctttcacaagcagttcacactcgtctttagcgccgctttagtgaggcctgctatgatatatagcgtattacacgaagggatgggtgatgaatggataaagaagaacaagcaacgagtcagaaagggggtatgaaacgatggattatgatctgcattacaagttaaggcgtggaaatatcaaagcatttcgggagctttacacgcttgatctgcgcagattgtggtttatctgctgccacatcacagaggatgtgaaaaaagcagcccccttgcttatcaacagttggaaagccgcgatagacaaaacggtcaataccgacactccgcccaaagaaagctttggtgtattggtatcagcggaaatactcaaggccgtgtcaaatgaacttgaaagcgatgacaactacgaaacattgcctgctcccattatcccgaaagaatacaccgtctttgtgaacggcatcaaacaacttgattacgaggaccggtatatgtatcttttgacaacctttggcggcttaagtgcccatgcagtcgcgaatctaacagagatgccgttagagcaagccaagaacaggatttcgtcattatcggcaaaagcgcaggatactcccgaaataaaaggacttggctttgctttatcagtccggctgttaacagagttcaaaagcccaaacggcaatccgttttcaaagataaatatcccacagtttttaatcactactctggaacacgattatcagcttgttatgcggaagcaaggcaaatcgaccacggcatcaaatgttggaaaggaaacaaaaaacatgaaaacacctgtaaaaccaaatcaaaaaaccgccgctaaaagcaagggatttaaatatacgaagccgattgtagtaacagcggtgtctctggcagtggtgattgccgccgttatcattttgccgaaagtactcggcggaaatgcagcggttacgagaatcaccacatacaacgtggatgaagttgcctacggtaatgtaacacagactatcagcggaagcggaacactcacccccattactaaggaaacacttacatcttccaaaggcggtgaggtggaagaagtcaactttaccgttggggatgaggttactgaggatgctgtaatcgctgtgataggcgatgaggaaatcacagccccttgtgatggtattcttttggaacttcctatcgccgctggcgatgaagtggctgttggcggctctgtggcaatggttatgggcaaagatggatttacaatgggaatcgccgttgatgaaacagaaatctcttctgtagcactcgaacaagacgtcacctttaccattgatgcgatcagcgaagaatataccggaaaagtaacccaaatctcttataacggctcctcaagcggcggttccgtagcgttccaaattacggcggctgtagaatatgttgaagatgtttatccaggcatgagcgcatcggcggaaatcgttatcgaggatagtggagaaggcttgcttgtccccgttgatgctgtaaggacttctggtgacgacaactatgtatatcttgctccttccggcgcggaggtaggtactgtttatgaagaaggggatatggatgtcagcgatttgacgagagtcaccgttgaaaccggcatgtctgacggaacgtatattcttattgaaagcgatgagcttgccgagggagacctcattgttattaccaaaattacttctaccttaaccggctccgtcaacgaaggcgaagacggcggcaggggtggaatgggtggattccccggcggtggcggcggaatgaacttcggtgatttcgactttgaaaactttgatcccaatcaaatgcctcaaggcggcggcggattcggcggatttggcggattcggcggttaaggagggacactgatgataaggctaaagcacatatacaaatcctatacattgggagaggttgatgtgccggttctcaaaaatgtcagcctccatgtgaagccccgcgaatttgtttccatcctcggtccgtcgggaagcggaaaatcaaccctaatgaacattatcggttgtcttgatatcccggacagcggtgattatatccttgacggcgagtatgtagatagctgtactgaagacgaactcagtgaaatccgaggtatcaaaatcggctttatatttcagcagtttcatctgctgcctgacctaaccgcttatgaaaatgtggaaatgcctcttttatatcacaagatctcccaggcagagcgccacaaacgagtgatgaaaacactggggcaagtggggttagaagatcgtatgcaccataaaccgtcgcagctttcgggcggtcagcaacagcgtgttgcgatagcaagagttcttgcaagtgagccttcaattatccttgcggacgagccgacaggcaacttggactccacctccggcaatgaaattatggacatcattaaaggattatggaatgacgggcataccattgtcctcatcacccacgatatcaatgtggccaatcaggcgggtcgcaaagtatacgtccacgatggcattttaagcgataaggagggcaaataaatgacttggaaaattgtcaagctctccttaaagacaatctttaataacaaaatgcgatcctttctgacaatgctcggcatcattatcggtgtaatggcggttgtgattctcgtttcgattactcagggagccgcaagcggcattaccgacagtatttcggatatgggttcgcaacagattacggcaactatttcgagcgaggaggtttcgattacagcagattcggtagaaagcctttcttcctatcccaccatcagcggcattgcacctgtcatatccacaagcaaaacggttaagaaaaacagcaacacaggcaattactcggttgtcggcgtgactccttcttactttaccgttcaggatatggatattcagcgtggcagaaagatcgtagactccgatgttgagtggaatacaaaggtttgtgtaatcggtacagaagttgcaacggatttatttggaacttgggatgctgtaaatggcacgattattgtaggcgatagcctctataaggttgtgggcgttttggaggaacaaggctcgagcctcgcaggaagcgatgacaataagattttaattccttattccaccgcttcccgtatgaccggacagacgggtgtgagccggttttatatcaaggcggcaagtgagaacaccgtcagtgcagctatcagcagtgttgagatgtttttactgcaggccacccgtgacgaagaggcctatgatgtaagcaatcagtccgatgtacttgacacaatggatgatgtgacaaatacgatgtccttgcttcttgcaggtattgccgcgatctctcttcttgtaggcggtatcggtattatgaatataatgctggtgtcggttactgagagaacccgtgaaatcggcatccgcaaagcagtgggtgcaaagagaaagcatattatgcttcagttcctatgtgaggcgtgtattctttcagtgctcggcggtttaataggcttggcactttctatagcaattatagagatctataacctaatagccaaagccgctgttgcaatgaactggtcggttgccatcgcggcaattgccttttgtgcactaatcggcgtattgttcggcggatatccggctgcaaaggcatcccgtctccagccgatcgatgcgctccacacctcgtaaataggggatcgggtttgagcataggcgaatgtggagagctccctcataaaacaaacccaccagtcactctggtgggtttgttttatgagggagctcttcctaaatccgattgccggatgaatgagtcccaagggacaaaacggaaacccgaaagggtgtccggaaaacaatcaggacaaagggatcctttcctgtatattgccggatgcatcgattttttccacggtgatatggccgccggacagggtgaaaacggcgccgagataacggctgggatcggcatccgggttgcccccctgctgtacaacggggaaatggacccgcaccgatgggctttcaacccggaaatggtgcgtatgaccgcagatgctgacatccgccgcgtcgttgagaagatcgacgatcccttttaggttctgcctgagaggaaccgtttccgtggagatggggatatgcgaaagatgcacgaaatacgctgcttccgccgcctctgcctccgagacggcctgctcgacgaaggccgtttggtgcgtccggtaattctccccgtccgaaaggcccgaaaagccgggataggcgtccgctttgttgaaggccaggtcgtttatcagaaaataggcgttgttgtatgccagtgtgtaataaaattcgccgttgggcgtcgggatatacgcctggaggcgttccgcttcctctcccaaaagctcatggtttccgcggacatacacaaccgggagctccccccggctgacctcggccatgaaatccaccagcatggataggtcgtaccggctgctcgcgtaagacagccagtccccgaggcatacgataaaatccagccggtcgaattgggccgataccgcgtgaatggcgccgccgggctgggcatgtatgtcggaaaccgtaaaaaaggtcccgccttcctctgaaacaggcgtcctgaacggcgtcggctttccgtgcacggtgttgccgaagaaggtatggttgctgacggtaaacaaaaccgattttacccccacacggtaggtggccccccgcaaggcgtccttcggaatgtccacctgatggatggtggtgtgggcaacgttttttccatgcgcggcatggtaataggtttcggtctttccatctttggtgacctccacaaatcccagcccgcggcggttggagagaaactccacggtgtattggccgccggtatcgaacaccacggctcctgtcgtgagatagccggggagagtcaggccaatcgcggcggcggctacgcctccggcaatggagagcgccgcgaagcgtgccgcgcggctggccttcagccggtcgtatagcagatagagtgcggccgccgccgtaccgagaaccagaacaggcagcatctccaacaggttgttgccgaaatgagggaggttgggtaggttgacgatggcgacgacaagggacagaaccagaccgagccctccggcggccagggagacaacggagacccaggcgggcagctttacccgccacatgacgagaaacagcgcaagagcagccgcctggatcagcaaaacaggcagaaagttcagcggtctatggtcatggaaaaaatacatggcgcagcgcacgcaccaggcgatgactatgccgagtccagttccgcatatgccgatgatgttgagcgtcttatttttcatgtccatgtccccttatgttgaccaggccccataccgcagggatggccgtctagccggcttgctttggtccgccagatcccgccgccggtaggcggcctgccgcgcgtccctccagacggcggaggatcgtgcatgggaaaagtatacaacgggggatgaaaagaatcaaggctctccgacacggctcctctgccgatcgggggtttttatataatctaaaaaagaattgacaaaaacaataaactatactatattgtgtttattataacttgaaacgagatgacgatttatgtcaattgctacaccgccggaaaacatgacatatgaggaactccggcagggctatcgcgtggataaggagtcgggtaactatacctgtatctgctgcggtaaaacctttgaggcgggggaggtgttccctttcggcgggcggtttttcgaggcgtcccgcgccgtcctcctgcatctcgatggagagcatcccgaccggtttgaacgcctgctccggcaggagaacaaatacaatccgctgaccgagaaccagaaagagctcttcggcctgttccggcaggggctgtccgatgccgagatcgcggacaggctggaggtctctccctctaccgtgcggcatcagaagcacgtctttcgcgaacgggcgaagcgggcccgcctttatctggcgctttatgaaatggcgatcggctggagatccccgcaggaagagggcacccttccggccccgcccgtccggatcctcgacgagcgcttcgacgtcacggacaaggagcgggagaaaatcctctcggccgtgttcgaaagcctggagcctctgaagctgcgggtcttttccgccaaggaaaaacgcaaggtggtcgccctgacaaaaatcgtggaacagttcgaacccggacgcacctatacggaaaaagaggtcaatggaatcctgcgggatatttttgacgattatgtcaccctgcgccgctatctcatcgagtatgggtttctggaacggacaagggattgccggacgtattggcgccgctgaaaagaacgaagcggcggcggtactaataggtatggggtgaaggctgccgaggcggggcgggtaagacggcgatatccgcgcatagccgctccaaacgccgccttcggacatggcgcggcagggtgccttgcgcgaagagccgctatacctttcggatgacgccgcaggccaggcggctgccggcattgcccgccggctgagaggtaaagtcgtccgggtcgctgtgcaggatcacggtcctcccgattatctcgtcgatcgtgaatcgattggccagaaacgcgccccaggcgtttccctttcccccgaaaaggggcggcagatcgcccgcgtgctggggatgcgggcagtttcccggattgaaatggcctttcgcgtcggagaagggatccgcttccgatccggtacagcttccgccctcatggatatggaatccaaaaaaacgccccgcgcagcggtcgccggatatgggaaggccgtgtacctccgtgagcactaggacaccgccgtttacgggatagaatgacacctctccggaaagggagggatggtttttgtccccgcggagctgcgcgcgggcggccggtttgcttttgagcagttcgcccaggtaggcgcggcttttggaaccaaagaaaaacatgcttgtcacctccttcgttccagtgtatgtggaaggagtgtgagcggtgcgcgctcttttatggttccgccctgttttgtgctggttggggttatcaccggccccgggcgcgcgccgtccagccgccctggttgccctgtcactttcttgtcaaggaggatctccccggaaacgacaaaaacagggccccttgtttttgtccggtcatgtaaggctatggacgcaccttatccggtcagacgtttgcgcatctcctggagaatgacccgctcccggcgggagacctgcacctgggtcatgccgagtttctcggcggtagcctgctgggtgtggcggttgagataccgcagtacgatgagggcccggtcccggggctccagctccccgagcacctgctgcagggccagccggtcggtgaccgcctcctccggcggggtgaccggaagatcgatctcttccccgtcatcctcctcccccgcccgggtcagggataaggccggcatcgacgcgccgagcgcttctaccgcctgctcccgctccaccccgagcaggtcggccagctccccgacgctcggctcccgcccttcccgcgcggtaaaggcatcccgttccctggaggcgcgcagggagagttccttgagggaacggcttaccttgacggtgccgccgtcccggaacagacggcggatttcccccaggatgaccggcacggcataggtcgagaacttgaggccccgttcctcatcgaagccgtccgcggccttgaccagccccatgcagcccgactgaaacaggtcgtcatattcgatgccccggcccatgaaccggcgggcgcaggcgtgtaccaggccgatattgtcgcatatccgctcttcccgtccgctcaaggcagcttcgcctgccgttcccgcagcactatgtacttttccatggtcaccacggtccctttgcctttgcgggagcttaccttcagccggtcggtgaagctttccatcaccgagaagccgaggccggaacggtcgtcaccccctgtcgtgaacagcggctccatcgcctgctccacatcctcgatcccacagccccggtcccgcaccttgaccacagtccgcccgttttcaaacagcctcatctgtaccgtgatgtccccgatcgaatcgggataggcgtgcacgatacagttggtcaccgcctcgctcacggcggtgcgcaggtcgctcagttcgtccacggcgggatcgagctgggacaaaaaagacgccaccacggcacgggcaaacccctcgttcgcggagcggctgggaaaggtcactttcatctcattgatgggcttcatgggaatcctccttctgtccgccgtcatccgccgcggcctcctctaaaatgtgcagccggtctagtcccgccagccgcatgattttctggatccgttccgacgcgcccgtcacgctcagccgtccgccggcgagctgcatgagccggtaccgtcccatgacgagcccgatgcccgagctgtccatgaaggtcaccccttcgaagtccagccggagccgtttggcgccggtccggtccacagcgccgtcgatctgctcccgcagggagcgggccgcgtgatggtccagctcgcccgagagccatatggtcacgccggagggcgatgcatccatgcgaatcaccatgtccattcctcctgcctgttggaagtccgggaaccgggcaaaaaacccgcaaaaaaacaagcccccgtcatgtttccatgataagggcttgtcccgctcgatgcatgagaatcccgccgtcgaattccggaagctgtgccgggatccgggcggttttcctattcttttgtcaaaaaggggcggatcaccgacgcgagaaagaaggatccgcccaccaggaggggcccctctcccgcctcctcccgtgccaggacgagcgcctgttccgggttgtccgcggatacggcctccaccccggcttcacggaaaagggtggcgagcgcctcccccggcatggcccgtggattgtccggggcacagcacaccgcccgtgccgccagaggggcgagcagggagacgcaggcgcggacgtccttgtcccgcagcatcccccacagcagggtcagcgggacgcgttcctcctccggaaccgtcaggagtgtctccgtcaaagcccggataccgtggggattgtgggccccgtccagcatccggagaggatggcggcggagcacctcctgccggcagggcatccggataccttcgagcgcctccaccgcctttgcccggtcaaaagggaaacccttggtttccagcagccgcatgacgccgagggccgtcagggcgttgtccctctggaaggctccggtcagggatagggacaccggcgccccttcccattcaaaaaccaagcgtcccggcgtacactcccgaatcggcgccgcggcggcaccggggacatggacggtaagccccatgccggccgcctcttccagcagcaccccgagcgcttccgccggctgcccgggggaacagactacgccgcagccgggccgcaggataccgcatttggcccgggcgatctcctcgacggaatgccccaaaacagccgtgtggtcgaggctgaccggggtcagcaccgcggccacaggatggtcgaatacatccgtcgcgtccccccgcccgccgaggccgcattcgatcacgcacagatccgtcttttcccgggcaaaccaggtgatcgccatggtggtgagcagctcgaattcggacagttcccccgcctcccccatggcgggagccagagccgcaagttctccggtcagggcggcgaaagccgcctccgaaatgggattggcgtcgatctggatggtatcccgcacccccgtcacggccggagaggtgaacaggccggttttcaagccgttcgccgtcgccatcgcctggatcatccgtgccgtcgaacccttgccgttggtgccggcgatgtggattacccggagcttgtcctggggccggcccaggagagaaagcccccgctccatccgggcaaggccgggcttcattccccccggcttcaacgcgtcgatataggccaaggcttcggtgtaggtcataatcgtcccctccgtttatctcactcgattcttccagtataccacatctttcccccgtgaaaaagggtcgggagaaagagcggatacatcatcggtgaagaacccaggcggagatctgccgtcaagcatgaaaggccccgcgtaatccacgcggggccttcctgtcgtttttcgccgataccgtgttgtccgattaccattttcaccgcttttttataatgcagacgatcgtccggctccccggcccgtttcaggcctcttccgcatcggaggatgccggctcggacgatgcctccccgccgccgaaccactcgcccagccgatggctcagcccttcccaccattccacgattttgaacttgacctcgtatttctgcggctgtgtgacgatatccacctggtcttcatcgagtacgtcggacaaatccttgtgttccgccgcggccggcacgcagatgggcgggaagaccacgcaccaccagttttttccggcgccctcgccgatggtgatccgcaccgcgtcgtacatgcccgccggcagggtgcccgtgtcgtaggtgcgggtggtaaagtacatccgggtcagttcggcgtttaccggatagtcatagccttcgtcatacacccgctgctgagccgccgccaggagagccggaagctggtcttccgcaacctccagcgcctcgcccgcgtcgccggccgtgtcgaatagcccggcggcggtttcggtgacggtgtcccgtacccgcagcttgagggcctggtcctcttcggagtcggaattggcgagcacatgcagacggaccaccttttggcggatttctccgcagtcttcggcgaagccccatgggaaaccgcacagagacagcagtagcgttaaaaccagcccgcaggccagtgccttgatccatttgcgcatttgagatcccgcctttctcgggttggcggcgtgtcccgccgccggatactcagagtatggacggaacagattgggttatgcaggaacaaaggaaaaaatttcctgacataaagattccgcgcataggacagagaggaaaaattatccggaaactccgggcccccttattgtataggccggttcaggtggcggcgtccgagtcgattttcatagagagaaccccgggccggcccctgaaagacactctaaaccggcgggcattggggccggtcacccgccattgtggtgtcccacaatggccctaaaaatcaaaaccatccggggctccaagggaactccccttggcacgtctttgcctactttcttcgtgtgaagaaagaaggtgggccctcaggccaaacctgaaaaggacgagcattgtggtttgtccgcgcataaaaacgcagtccttctaaaaaggagatcggttgcgcggccacgtcctttctccgcgtggagaaaggacgcaaagagacgcttagggggtgcccccctaagcaccccggatggtcggccggtttttcttttcaggaaaaccggcgggaatgttgactcttgaaccaacgctatacaaggagggggcctggggcccccggggctcgattgggcgcggggccgaaaaaagacagcaaccccaagccctggggccgcagccccttcctgtatatagtgggatcgggtggtgaggctattgccggttttcattaagagaaaac

SEQ ID NO: 4623 - DNA, 14919 bp, Unknown
  16S sequences of unknown bacteria
cgatccccggcttgttccaccgggagaaccaccccgaggcgggcacatacgcacagccggtcgagtggaccatgattcctttgagccggtttttcctccccactttgtagcaatcgttttccttcatatatcgggtgtgtatggtcatcggggttcctcctttacttccaccggccgatggcgaaacacttgatcgatagcggcgttccgttagtcgttgccagtgcgctcaagaccgcaaccttaccgaccgatgtcgacgacgtgttggtcacagatgtggtccatttggttggctcgtattgctgctccgccttaacaaagggagtcccataaaacgattccggaaacgtccccaaatctataaatgagctaatatataaactcccggacgcggaaaaaggctccactgacatggtccttgtcgcggtccaaatcatcgtcccgtcatcatatttaacccaatacccggtagacgccgatccccccgaatccgcgattcctgccgcggaaaggatagcctccaatatcgggtcgagggtggctttgttgaggtctgtccccggcacggtcacggtggccttgctgacaatgcggtactgccgtttttcgccggtcaaaacgtcctcaagctcgaatagatcggtattggttgcctgacggtctataaattccgagatcatgcatatcctcctttaaaccggcagcagaggccgggagccgctttgtgccaccccgcacgggataaacagcatggccgtgccgtccgctacggctttcagtacggcgatgtggctttccagcgtgttcatgtcggtatagtcgagcgccgccttgtccgcttttgtggacagtgcgggcagcccgggcgggacgatcaggataccttccaacgaggcgatattccccacaatccggttatagtccgccgctgtcaaaaagtcctgttttgtccaggcggttttttcgtccagcgtcaaagggtagccgtaatcctggacggtcaataggagttcgtggatattcccctcgatgcggctgaaatccacttccaggtcaaggaaatcctgtgccgtccagtcggttttcggtgtaatccacatcaggcgaccacctccacgttggcgagcaagccgccggtcaggtcaatgtccatgcgccggatattccctaccaccggcccaaaccgcgtggggacggatatccgcgtcccgcaatccatgccggggacccagggggtgcggagcttgaccttgagagccttggcataataccctttgagccgagccatcacggcctcggaattggtgttggatatcagccggataccggatacctgtaccgcccgcccgccggataccggctgtgtccccttctggcagcttgattccgttaccgcgtcgccttcgatgacgacatacagaggacccggatcggcatccgcccacgcttcgagggtcacgaaattgtatcccacccggccggggacttcgtgccactgtccgcccatagcggattcgatcccgccggtgacgttgtggccaatcccgtctatggtatacttgtaggattcccgcgtcgggcccggaaagatcgggtagggcttatacaggccgccagattcaaccgtataataaaacacctcgataaagacacctgttaccgcgtccgttttggtgatcgtgggctcgcctaagatgtcgccctcccctagcgtgaccgccggatcggcttccggcagggacgaaacaagtaaagacccgtccctccccgtccgggcgaacccgccgccggctacgcagatgtgggatatggcctcacgggcctctgtctccgggatatacccctggcacaccccggccccgatagtgggatcggctgacccgggtatcccgcagacggcgaggacatcggccaatagctggcccatggtaaagccgtccccctcggcataaaacgccgaagcgtagctctcgtccgcctttagcccgaccacgtcctctgccgtcagcttggccgtgccggtgttggtgccctcccaggtgtcgaggtaatacaccccgcccggataggctgtgccgtcccgcaaaaactccaccgtcaggggcatccctttgcgcagatatgtgtaaatcccgtccgggttgaccgggttcaaccgatgatccgggtcaagcaccgtaaagcgcagggagttggccgggaccgatccgccggacaggtcggcctcctcgatcgctgacgccgtcaccagcgtttccccgtcatacaccattttctgcccgaagtcgatttcctggattttaacatacctatacggctcatccgtgagggtggctatgatctgaaggccgttgaagccctcgacatggttttccacgaacacggtttgcagggtgttcccggccacgtccacagaggatttgacgctcccgttatataaccaccgcaccgtgaatgcggacaggtgggtggtgccgtcgaagtggatggtgatcccaatagaggtatggagcgacgcaaacccacaggacagcataggggacgttggatacagcctgtttgacccggacatggatgcagaccaataccccaggtggcagcccgccggcgtgcccgggaacagccgggacgacccatccaggcggtatacaccaggttcccccgatatataccgcccgaattcgtccgggttctcgtcagggctcaggccgtccttgatctcgctgtaatccacccagctttgagcactgccgcttgccgcgtaatacgacgcctcgtccttggccgtctcatcatagacgccgaacgatatacgcgcgcccgtaggcatggatatcacctctcaataaccgacactttaaagcttttccagcgcgactgacacccttgccccatatcccaataggatagcatggtcacactcatgtctccgatgtacccttgaaacgtatgagatgtcccatcgggattcggaacggtaaagtttgcaaattcaggcagagacgcaaacaggttccacatggagatgaactcatcgttatccggcatgtatggccaggatagggtgtatttgatctttttggccgcaatttcccgatgaagtattccattcatgtcacgttccgcatatttatccaggacgctatacaccacatcgacgccggctgggtttatgatccaagtcccgtttacggtcaccatatttttggccacattatcaaaccacctttacgatcgttcgtccggaccgacgatcctctgcctgcaaaaacgggtggagggcccgcgctgcgctggatccttccacttctagtgtcatgccgttccgcaaaagtgaaacgatctccagcagcgcctcgagcattcctggcatcagaccgtcatcctcaccggcagaaacggacgccatagaataggatcctgtttctgtggccgagccccgcctgacctgttccagcgctggcatctgtaccgccgcggtcagatccggaaccgttttgcccatcatcttctcgacggtgcccatctcatcggcaaacccttcacctataccgagcgccatattcgcgccgatgacgtcagcaaaaactttagacggagaatggatgccaaagaggcccttgaacccgtccagcagctttcctccggcttccttgatggcgccaccgatgttcttgacaccttcaacaagcccgtttccgatcccggaaatgatatctttaccgacctttagccaatccgtattgataatcccgtccacgatggctttcacaaccttgggcagggctaacacgagttctggtattgctttgatgagtccttcggcaagggccatgatgagatcaagagcgcactcaaaaatctctccgagattgttaaccaagtatcccacaagcccgccgaccacgttgatggcacagtccagcagttttgggatagcgtttaccgttccctctataagggaccggatgatgttcggagccatttctatgataatcggcagagcattgatgatgccctgagccagagattcgatcagcaggatggccgagtccaccagcatgggcacattgtttgccagcccttgcaccagtgtgagaacgcactccacggccattgggatgaggctcgggagcgtggcggatatgccgttaatcagctccagcaggatcgtgatgcctgactgcagtatcacggggagattgtctctgagaccctgcatcatcgtcataatggcctgctgcgctacggggatgatatcgggcatccgctccgacataccggttataacgttggccaggatggccacgccggtggcaatcagctgcggactgtaggtcaaaaaccaggtgatcagggttgtaaggatgtctgtcaccgctgcgccaatatcgggcaccgcctttttcagcccgtcaagcagggcagatagtatgccggtgccggattggataatttccggaaggtgatcccgtataccgctggcaaacgctttgatgactgccacggcccccttggcaaaaccgggggcggcctccttgagcttggttaggattgccgctatggctgggccaataccagcggccagtttcgtcagcatgtccgatacggttttaccaaaatcttttgcgtcgccatacgacgcaccgtccagcgcatcgaggtctacacccgcatcctctttcccggagccgccgagaatgttaagctcgtcgaatccagccagtgcgccggccgtttttttagcttctttggttgccgcttgcatctttttggcggatgcagcagcctgggcgtatgtctgcccaaaaagaccggccgtcgccgccgcgatacgctgggatacagccgcaaagccggaggccagggcgttgagggcaggctgtacggcctggacgatcggagtaaacgccgtcagcaaattggccttgatgaggttgagtgacgccgcaaactccttgttttggcccacggcgtccccgatcagggacttgattccacggaaggccgcatacagccccgccatgagaaaagcggacttaaaggcgcttttaacgcttctggacagcccgttgacccgtctgccgatgtccttcaggtgtctgcctgcggatttcccggcgcccttgaaggcgtcgctcacctttttccgaacggacgtcatggccttgcccacagctcccgaagaccggttggcatccgcctggatttgcccggagctgccggacgacgccttgcggatcgccgcctccgtctgattgacggattgctgcagggataccattctagcctgtacggcggtgatctgggagtcgatctccctggccgcgccactgtcggcccctttggaattagcggtctcgttatactgggcggtcagggctttcagcttggcctcctgctcccccagctgtgcattgacgatgtccagcttttgcctgagcagctccaccctgtcgacggcgaccgtgaacatatcgccgatttttgccggctgcgggcgattttcagccccgtatgggtctgccgtcatctggctggcaagcgccgattttttgacgaccggtgcacggaactccgggttgagcctcgccaactcttcagcggtcatctccgtccagcttttgaccttgccgaccgattccccgatccgccggtctacttcgtccatgggcctcttgatggcatcggccacattctgcccgacgcgggaaaaggcggagccggccgcctgctcgccgctcttcgccgcggcccggagctgcttgacaatggtgttttggatctcaaggtcaagggataccgctcctactgacatgctcatgccccgctaacctcctttccgcacaacgtcgccagcgcccgctgcagagccatctggtcacgggccttggccgtatttcggtgccgcgcccactccgaccggatccgtttctggtccggggtaaaccgccggatcacatccggatcggattcggaccgtatggacaccacgcgtcccaggggcgtgtcctccatcagcccgccaactagcttagaccagtctgcaaaagaaaggctgtcctgatcggacggcaacactccgtattgcttagcgatgctctgctcgatcagcacccggtcatgctccaggtcataccacacatcctcattgggagcccgcctgctgaaatcgggcgtcaacaacgtcctcgtcctccccggtcatagccgcgacgaccaccttgaccagttgcacatacgccgcgaacggaatatcctgctcatcgatttccttggcggccttatcgccgaaggccagtttcaggatcgcgtccatatcgtcctgatcaatcttcatcagctttttgactgtactggttcggctgtccaccggatacaccttgtccccgatccggatttccggcgtgttggtcagcagcttgccgtctatggtatagagcttgcccatcgtcgattcctcctgtaagtgcggcccccgccatcaccgacgggggccgtattgtttaagcgctggcaggcgtgtaagtgggtttcccgtggctcatcacatcaaactccaggacggccacgttggtgctgtcgccgccaccaatggcagttacgttgattactgcttccatttccagcttgtctccgttggggaaggcccactcgaatttggtgtcgcagtcggtcccggacttccaggccagccccgctatataggcgttgcccggatcactgggacagagcttgccggataggctgatggtcaacgccttaccggtggtcattcgttttgtccagccctccgcttccatgggcttccattcctctacgttgccgtcaatggacacagaaaagctttccatttccgcgactgtcaccatgtcggccgcctcgctgcttcgccccgctttgccgaccttgaacacattgtcgaaaaccgggaacactccggtattagccattttcttcattcctttcatatcgaatatggatccggataacatactcacagatccgtccctcgcggcccgcccattccggctgctttccagggtcggcggatacgacccgcaccccatccatgacggtgccggacaggccatgcagcaaatcgtacaactccatagctttggcgcaggcggcgaccgggctggtggtccagtgtatcaggacgacgtatgcgcggtcctggtattttgtgtattttctgccgccgacacagattcgctgggtgccggaggctttgccgtcatacacgccgatataccggtcctggtttccgtctatggcgccgaccgctatctgcccgtctccgagcttcatctgctccttgagccagttcttgaggttttccgctgtcacagcttcgcctcctttttgagcagggattcaaatgtttcccggacaaaatccttcctgtccccatcaatccacggctccagccattcgccgccggcatgggggttgtttgccttttggaaattgtattccggatgaaaatacaggcggcgggcctggggggacccggtgacaagggcggcgtggacgacgtccccggattgccgcgcatcggtgaaggtatcaacgttctgcatggttccgacgttgtacggcatgacctgtgcagaaaccacgtcggtgcgcagcgcctccatcgtcagctccgcagaccgcagggctgccgcctccaggtcttgaagcgcccgtggatccagggtgattgttatacccatcacatcagctccagtctggtatagttgaccgtcccgtccgggttgcgggcgcgggcggcggactggatcacccgcggcgtgtcgctgccggcgacggtcaccgtgccggacagcgtctccagctccggggcgatgtccccgttgagcagcaccgccgcctgtagccggatcagacggcgctcggcgtccatgatccacttgttcgcttccgcgtaattgcccatggcctcgatgacccggccctccctgggggtgccgtcctcgttgatcccgggcagttccagacgaatcgtgaccggcgtcgtacacacggcgtccggcacaagcaccggccacatcatcggcccaccccccggtacgtcagccccgtctgcctcagcagcgatagaacggacggagcggcgtatacgccgccgacgcattgtaccgcttctttatcccagctcatggacacaccgttgacggagtaggacgccaggggattttccagctgatcgccgtattgcgcccggaagtcggcctgacggacaaccgccagcttgaccagctcccgctgaaaattcgtgagcgcgtcgacacccgcggcacggacacggcaataggtcaggctgtcgatatcgcgctccgcgtcctccagcgcctgcgtcagctgaccctccgccaccgcatggtcacgacttagcgccatatactcgtccgcgctcacatacatggtcatccctccgttttgttctccggcttcggcttcctcggacccttgccggccaccgcctcataccgctcatccttcgacagcgcggcctcggcctccggggacaacggctccaggaccacaccggtttcagtgttacgatatttcacggcttacgcctccgcccattttaggatgaggtcaggggtcagcgccttggtcccgtagtcgtagaacagggacaccgccatatcgttggacagcgggattttctccggctctccatacggataggtcactaccggctgggcgacggatccgaagatcatcagcagggcatttgttttggcagggagacgggtacagctatacacccgcacaccgtgatacatgccgaattcttctcccgccgtatcgacattcgggttggattgggtatccaggaaggtcctgatttcaccgtatttggccggggaaagcacacaggccatcaggtcgcgatccacgccgtcggtgttgtcgtttttggtggtttccagcgtctggaccatcgattccagaacgccctggatttccgtcactccggacgcgggcgtgaaggcggtgccctcggtagccgcctgggcaaaaaaggcggaatccagttcccggatcatggactgggcgtgattatccgcccgccggcgcatgatatccgccacgccgaaggtgtccaggtcgaactttgccacttcctccacgatttccttgtgggttgacagattgacggtgaccggcttgacggtgatcttgtcgcccgctccggcggttctggctgtgccgtaatccttggaagcggcattggtaaaccgcgaaaattccaccgaaccggcagcaggattgccgctgtactggttggatttgagggccgtggacagagcccccttctgtacgttttcgatcaccaggccgtaaatttcggccagggtcgcgggagtgctggtgcccgacaacagactgattgcgtttgttctcgccatggttcattcatcctttctctttatcaaaatatgaccttgcctgccagggcccctttcgcctccggcttcttgtcctgttcatccgcaccagctttgtctggtgccttctgcgctgccccggctttccattccgggtggcgttccatgacctctttgagagccgccgatatggccttctcgtctgcctctttgccctcctgatccagcgcgtatacggccaggatcaccgcgtccgccgcttgcttcgggtcgatatccgactgcaccgccgccagctgtgcgcgggcaattgtcagttcccggatcagcttctccttctcgggatccgcttccgtcatgggggcctccggttccccggcatgatcatcggctgccgcttcttcctctttcggttcctcggcggccgggtcggtctcgggtgtctccccagcgggctgctcgacttctctcttctcctcttcctgcatgtcctttcctccttttttctgaaaataggtatgaaaaaagacggtgcttgcgcatcgccttcaatcaacggggattcattttgtgggttcgttgtgttcctcaatgccgagtttctccatagttcggcggtggatcctttctgaccgctccctaactaaccgcctgatttcaggatccttgtgaaacaaccaatgccactcgtctatatggtcactatcgtgaacctcgtcggcgagcagtttctttacaacgtcaaggctttctgatgtatcggaacccataatcgccaacccctttcagatatttttccatgaatgtcaccagtttttctggagtcgaattatattcgggatctgaccgcatcatgtcatccaacctacggtaaaggccgactgcatcaaagttttccatacgctcgatggtgtatatctgaccaccgttgcctaccactgacagcacgatttcttccggcgcctctataaatgccttaatatcatccgttgaaaatgtgtgtccacttggatggttgtggatggatacatgaggctggttgaccttcaacccagacacgcgccacatgccgcccctgcttgacgccagaggccgcatattcatgtcgtaatacgcgatggcttctgtacccggttcagcgtcttgcaagccgcgcaggaggtcacggtgagccttgcgcagcgccttgtttccatttacgtccagcgcatgggtctttaccatcggaacacgttggatggcgctattcgtgatcgtcagaggctctacattaaccgatctcagtataacacgttcggccgattttgcaaccgcgcgggcgtctgccgggatcccgtgggtcttttcccgccagtagtccctctggagctgatctccattgtctgttatataggccctcagctctgcctgcgcggccctggccttgcgtcggtactccttggccttatcggagtcaagggttccctccgccagcctcttcagacgtcggattttggcctccatgcgcctctgtttttgttcaagcaccgccgtttcctggacctttcttgcgtccagcggcttaggcatccggttgacgccctcgatccaggtggacagcgtgtggcggcaatttgggtggaataggccggactctacggccgtggacaataggggataccacttgccattgcggcttttgccgcgggctccggttatctcgccgtcaaatgatccccaaacatcatctatgtatactcggccttgccatggcagacaggtatcggaacaggctccatactgactgaccaacaccgtatcgatccccagcgcggctctctgatcggcagccccgcgcaaatatgagcgcaggctggatgtacggatagccatttccgcataggtagcaatattgaccagacggccgttgcggtactgtatacagttgatcccggccgccaaaaaatctttggccgccaggtctaccgcctgttccatcgtgacacttccggtggatgctgccagctctgcccggtatattgtctgtcggtatacgtcatccatcatccgcagggatgaggattccgcctcatggagattcttgttcacgtcctcgacgaggctatccacccgacgtcgatcgaccccgaaaaagttttgcgtgtccggctctgtctccgcctcaacgccctgatcgtattcctcccgtatcaaatcttccacatcggcatcaatgacgggagcatattcggatataatcgcttgattctggcgacggaaccgttcaacatttcgcagcttctccgcctgccaggccggccagctgaacccataatccgcttcctcggatttgtgtcgtttcaggttacgttttagagaggcgatgagacgcagctctatttttgcgaagatgtccgcgatctcacgagcagtcacggcagctcatcccctccgcttggctcttccatttccaatagacccttttcgcgtttgatcctggaaatctcctcttgtatccactccttggacttggagccgccccatatctcctctaccttggcctccgtgctcatgcctccgcaggcgtctgcctcacggatggccttgattcgggacccaaagtcaggcgctgcatactcgccgaatgatacagtcggcgcatactcgccgatcggtcgcccgttgatccagtcgtcgatctgtagcagcaccgcggccaccttcggcaggacggcctctagctttgcggtgatgcgattgcgtgtgaatccagtgacgtctttgccctctcgttttgactccccagaggatgtggccgcaatattgattcccaaagtggcaggcgacaagatgccttgcaagcagagatccagcgcggacacgtatgagtttttatacgcttcgtaccggatatccggctgtaccaggtctattttatgaccttcgttcccggattcccgtatggggttttccacctggataaagtcggatccaaaggaatccacgctcatgggtaacccattcttcggatttttggggaccatatcctcggggatatatcgctggactcgccctcttctcacggcgtccagccattgggaaacaatctcgtccaaagcatcgaaatcgtctgtcttgctgttatagatagaccgcccgcgcccaagccatttggaactgcgccatacccggaacgggatggcggtcataaggccgtaaggaatctccgtgtcgcacagagcagataattctgggatgatgtctaaacttaccccccggcctcccgcgtcgcgcaatatgtatcggattcttccgggttcacgtatctcttccagctgatatttatcgtctccgcgccagtaatccgtgtaaaacgatacgcccgtcaaaaagccgctttgatagtgggatttcgatcgatcctctccgaaaaattcgagggatggtgcattggatactttcgtatcccacgatatccgaaaagcccctcctccggttaccagcgtatcggtcagagactcttccagcacatccccgaatgctatctgctcctgtagtttgtcccagcgtgcaatcttgccctcatcgtcatttcctccgtcgtccaggaacgtcattccatcataatctcctgctacgactccgaccaatacatccaccatgatgcccggaagtccggtatgcagtttcctgactttatcgccaaccggaacggcggaccagaaccggctgcatcccgcatccgtggacgggatttgcgcatacagctgcttgagctcgtcggcgtctcctctataccacacccggtttcggataacatccgtttcaaagctgtacggttctcttatgacgatatcgccccggtttgatgccggacgcacttccagccacttctgcattctggctttcaccctctcgctgattttcatgccttgccccctatccggtccttatacggcagccagctatactgatccgcgttgatacagtgatcgttacggtcctccggtgtgttgtccttatcctcccgccaggaatataagcccagctccttgaccaggggcccgcaggcatcggaaacgatcaaataatctccatgagccatccatccggcctgcaggttaatccgatcaatgagtgtcgtcttcttccaggcgggttggaaactgtacacgctaccgtgctgccgtgcatacttctgacactctaagatcgtcgcgtgatcggcgttgtcgatatagaccattcgggcgaatccccatttctgccggttacgatcaaggaactgaatcagcagcggcggaacatcgctgggcgtgatcggaatcgcccggtctcggttgttgtgttcctcgactgccagagtgatcttccgccgatctgctgtaattcctgtgaatacgaacgcgaaggtgtccggggattgctgggaatacgacgtatcgacgccggccgaaaattgcacatagacataatctctcgcttgtgcggcgggaatcatatgccgaggttccaggttaaacacaagccctgttgatcggccgcgcaatcccaatatcttgttcttgtagagcttggtgcctttgggaacgttctggataatctgatctttcttttcgagcggcagcccggcgttatgctcgaatgaaaaaaaccaatggatccaacccggtttttcatcctcattgagttgttcaagaatctctttcggcgtctcgtctttccattcgggaagagggcgggcatggttgatatattcgccataaaccggcaaactcggatcgtctgggttcagggtggccagaagataatcacagcgcatagcagcctctcgtacatactccatgtccgcgatgttgatctcatcgatgtacaggcatccgtactgaccgccaagagcctttttccagcgcgccttattgtcgtatcccagtacatagacgatcttatccccactgggcgtgtggaatacgatgtgcggaagcgtgtttccacctcggccggaagcgttatattcggtcagtggaccaaaatcgtccaggatccccagctctttttggatgatgtttttttcgatcgtgccaatgtcgagtccggataggatgtgaatgcgcttgtcgctctcggccactttgagcatgaatttgaaaaggccaaccgtagtttttccggcagcggtagtcccctcgagaaattccacaggagcgtcacatctaagaaacgccttgtatttttcggataacatcaaatcagccaacgccaccaccacgcagttgcttcagcacattttccagtttgtcgaacccggcttcaaggctgccgcttacctgcaccttttcaataaaccctccggcagctctggcgcgcagctcagaggcttttaaacggtcttttgggtcctgctcttcactccgcatgatatctgtccaaaaggcgttgatctctgccatgtcggcaatcctgggggcctctagcacggcatcccggtctttgatgtaatccccaagtttccccaagttttcgg

SEQ ID NO: 4624 - DNA, 20036 bp, Unknown
  16S sequences of unknown bacteria
cttccgatctgggcgaatacctccggggtgtagatctcccgctccagaaaatcatggagccgcgctttctggctttccagacgcaccagctcctttgccaggctctctgcggcgccaataagaattccctcctttggctcagcaagggccccggcggttcgcagctcagacaggtggtgggtgagggccaggaggacggcctgctccacctgctccagaggcaccgaaggggagcagccccgggtggggcaccggaggcatggggcaatgcctttgctctcctggtgctggcgctgcatttttgcaccacaaagtccgcaatagaccagcccggccaaggggtttttccgccggcctgcgtgggaagggctgtggctccggctttggaaaagctcctgggccagctgaaattgctctttggacacgatggcgggaaaggcgttttccatgcagatccattcctccggcggacgggggatgcttttgtttttgtcctccagttttttccgcttctgccatttgctgcggttatacagccaggtgccggtgtacaccgggttatgaagcatcttccggatggaagtgcggctccattgggcagatttcttggccggaacctgggcggcgttgaacagatcggcgatcttctggcatccttgcccctggccggtataaagggcaaaggcggtctgcacccaggaggcttcctgtgggtgcagggccagggtgggccgtttcccctcccaggctctcacatagccgaaggggacttcggtgacatgggctccttcccgggctgccgccatcaccccccggcgcatccgccgtacgatcattttgtattcctgccgggccatgaaggcttcgaattccgaataggtctcgtccatctcattgctcagatcatagacgcggcgaggggtgacgatcttacaggccgcactgcggaagctgtccaaaatgatgccttgggaggccatatcaccacggcccagacggtcgatatccatgcagagcaccgcctcgaaccggccttcctgcaccccttccagcagccgcagcatctggggccgaagataaagggattcgccggagacgatctcctcaaagatctctgccacagtcatctgatgctcctgagcgaaggccagcaatgtttcccggtgccggtgcagtgcgtccggatctccttcatctgcccgggatttgcgcagataaacggcagctgtcatatccattctcctttgtatgctgtttttattgcacctatatgaaccaaaagggcaaaagagacatgcaggactttgagaaggccggggcgcatacccataaggagaggtgatcgtatggattcatctgtccatgaaaaggaggaaatgccccctgctcaggacatccccctgcccgacggttggctctgccacatgacggtgctccatggagacccggcggaaaggccggatgtgatccgccgcctggaagggcttctggggcaaaaggtgatccacacaggctcaaaatagggaaaaggcccggcatacagccgggcctgcttcctgttttcttcctataaaacggttcctgcccttcacggcaggaatcataaacctttctggtatggatgcagacggcctctttgggcggatggttcccgcagagcgggcccggagaaactctatcaggcatcaaatgaattacctcctcaggcagatttgaagtttccttcattccatcatattcccccggcggcgtcgggtgaatgggaaattcatccatctcctaaaaagcattttctcatatattcaaataaattcaaaaattttgtcttgacattaagcaggaagggactaaagtataggaggaaaaataaaacgacacggagggatcgttatggaagttaccattcatcagctgctggaaggcgcccgggaggcccggggcgtcaccgtggtcatcgatgtgtttcgggcctacagcgtggaaagctacgcctttgccggagggatggagcggatctatcccgtgggcaatctggaagaggcctatgaactgaaacgggagcatccggattttctgctctgcggcgagcgggagggccggaagcaggagggatgcgactttggcaattcccctctggagatcatgaaaagcgatgtgcagggccgcaccatgatccacaccaccagcgccggaacccaggggctggaaaacgccaccggggccgatgtgctgctggccggggcgctggtcaatgccaaagccacggcggaatacatccgccggctgaatccccagcatgtgagcctggtgtgcatgggcctggcctgccgccgtcccaccgatgaggacactctgtgcgcccagtatctccgcgctctgctgctgggtgaggaatttgacaaggaaaaggcggtggagatcatgcggaagggagacggccagcggtttttcatcccggaggatcagtcctttgcccctcgggaggatttcgatctgtgcacccagtttgaccgtttcccctttgctctgccggtgcgctacaccccggatgggcgcaaatacatcgaaaaggccatggtgctgtaagcctttttctgcataggacaggcaaacagggcgtaaggatgagtggaaaggggtggcgctatgaaacaccacttaaaactcggtcccaaagccctttttgttctcctggcccttttgacttttgctgccagtgcctttatactgataaggatagggcaaaaaaatcagcaccagcaggtctccggctccatcggctatgagccggcggtgatcctggatgccggacacggcggcatggacgggggagcggtggcccaaagcggccagaccgaaaaagaactgaatctgctcatcgcccagaaaagccggatactgctgaagctcatgggcgtggactgcgtcatgacccgggacagcgacatctccctggattatgaagaaggggcctcggtgcggcagaacaagcagaatgacctgcgggcccgggtgaaagtggcggagcggtttcccgaaagctgtctcatcagcatccatatgaaccagttcagccagacaaagtaccatggagcccaggttttttacggcaaagccccggaggggcaaacgctggcccagtatatgcaggatgccttccgccaggccctggacccggaaaacgaccggaagatcaagccttcccccgatggggtttatctgatgaagaaggtcaccgctccggcggtcatcgccgagtgcggctttctgtcaaacccccaggaggcggaaaaactggggcaggacccctatcagaccaaagcatccctggccatcgtcagctcctatctgcgctttgccggggagaaagaggaaacaaagtgaaaaaaaagaccgtttatgtctgttccgactgcggctatgaaaccgccaaatggatggggaagtgcccccagtgcggccagtggaacaccttggaagaaatgaccatccgggaggaaaagccgggaagccttgcgcccaaaaacaaactggcggcccagcccatcccggtgtgcgacatcgatctgcactctgataaaagagtgctcaccggcatcagcgaactggaccgggtgctgggaggcgggctggtggtgggctctctggtgctggtggccggtgagccgggcatcggcaaaagcaccctgctattgcaggtgtgccggaacctggccgaaaagcaaactgtgctttatgtaacaggggaggagtccctggcccagatccgtatgcgggcttcccgcatcggggccatgtgccccgggcttctcattttgccggaaaccgatctggaggccattttccaggccgccgaccgtctgtccccccagaccctcattgtggactccatccagaccatccagagcgataccagccaatccatgcccggcagcgtatcccaggtgcgggaaagcaccctgcggctgatgcagtatgccaaacagcggggggtatccacctttctggtgggccatgtgaacaaagacggcggcatcgccgggcccaaagtgctggagcatatggtggacaccgtcctttatttcgaaggagagcggtacgccgcccaccggatgctgcgggccgccaaaaaccgcttcggctctaccaatgagatcggtatgtttgaaatggtgcaatccggcctgcaggaagtgaccaatccttcggcggccctcatcgcaggaaggccggagggggcctccggcagctgcatcgtgtgcaccctggagggcacacggcccctgctggccgaagtccaggcattggttgccaaaacggcctatggcgccgcccggcgcatggccgccggtatcgactataaccgggccgtgctgcttctggccattctggaaaaacgggccgggctgcttttgagcaattacgactcctatatcaatgtagtgggtggcctgcgggcatcagaacctgcggtggatctggccgcggccattgcggtggcttccagctatctggaacagacggtggacccccacacggcggtattcggggaaatgggcctttccggggagattcgggcggtgtccggccccagccagcgtctgcgggaaatcagccggttgggcttttcccggtgtattctccccgccgccgggtgtgaggacatcgaggtgccggaagggctggagatcctgccggtgcgggacatccgggaggccatccggggagccttccggcaaagcaaaccgaatacagagaaccatgaataagaaaataagtgagcgtcttatcgctcacttattttcttgctttttcacaaaatagacgcagtcgccttcctcacaggttccggcggacaaggcccgatccaggacacactctcccattttgtgatagatgcaggatacctcattgcagcaaatgctcaaaatattcccctccctctttgcaaattgccggtaatattctcaccgattttttgcagaatataagggagaaaacgaaaggcggtgctgccatgcgaggatttttgtgcctggcgtttaccatattgctggtgttgggaatgttctgggtcagcccctaccgggccatgaaccaggcggaaacagtggagacggtgggatgtgaacgggcggatattttcaatgcggtgaccatgtcgggaaagaccgaaagcgcatcggaaaccaaggtgtatgctccctcggccgcctgggtggaaaagctctatgtctcccaggggtcggaagtcaaaaaaggggaggccctggcccttttgcaagtgacagaggacccggaaaagctgcgccaggccacgagagaagccggggaaaagatgctggaatccctccttcaggatgcccaggacggcagtctggaagaggacagtcaggcccttttgtcccgggccgccggagccgggatggaagagtccccagagcctgcgcaggaggaatatatcctgtatgccccctgtgacggcacggtgatggatgtattttttgcagaaggggaaaccgtttccccgctgcttccttgtttcaccctggccgatttaagccagatggtggtgaaggcccaggtaggggaggaaaacctgccccagatacagcccggcatgtttgcagaaatgaccctcaccgcctttccggacacccgtctcaccggcaaagtccaatcggtggccccctatgccaaagcggcctctctgctggatcagagcggcggcgtgagcaccgatgtgattttttccatctccaacgatgtggcagatgtgaagccgggctacaccgtttcggtgaaagtgcgcaccgaaagccgggaggacaccctgcttttgccctatacctgtgtggcccaggacgaacaaaacagggaatatgtgatggtggtgcaggagggaagagccagaaaaatgctggtggaaaccggtttggaagtgggggagcaagtggagatcaccgccggactgacaggggaggaacgggtgatccgtgctcccgggtctctgaaaggcggccaggccgtgacagaagaggaaaaagcctatgaattggggtgatatggggcttctggcgctgaaaaacgctctgcggtcccggcagaaaacctttttttgcgccctggccgtgtgcgtgggcattgcatcggtgtatatgatctgtgaaatctcccgcaacgcccgggatcagatcacccagcaggtagagcaaagcggcctttccggaatcatggtattcggcaaggaggagcaggggatgatggcggcagaagagatccgggctttgccccaaagcgtgccgggcctcaaggccgccatgccgcttttttcccagtatggctcctgcaagctgcgggaggaaaagcgcaatatgctgctatggggcgtggatgagcaattttcttccatttttcatgtccaggtaaaatacggccgtttgccctcccaggaagatgtgcgtctttgtcagaaggtggcggtgatcgaagataccatggccctggaggcctacggccgggagaatgtggtggggaaagagatctggatttctaccgaccagctgaccgaaagttatcagatcatcggcgtgatcgcttcccaaaaaagcggcgtcagcgcactcatcggcgaaaacaccctgccggcctttgtttatgtgccctataccacagccaatcttttctccggcgtttcctccaccaatcagctggccctggcggcccaggatgaagccgacgccgaggccgtcaccgcctttgctctggatcagctcagccggaagacaaacggcgcttccttcaaagcggaaaatgtaagtggatacattgatactttttcatctatcttgcaaacggtatctttgctcatcacggccatcggcggtatcgggctgctggtgggaggcattggcgtgatgaactccatgacggcggcggtggaaagccgaagaaaggagatcggcatttatctggccatcggcgcccagaagagggacatcatcggaagttatctcatggaggcggtgatcgtttgcttgctgggcggtctggccggagggctgctgggctggggcttgttgtttgccggtgagaaactcctgggaatcccggtgcaatttcattgggagtatttattgctggccgaaggcgccgccggattctgcgggattctgtttgggattttgcccgcccgtaaagccgccgccatgcatcccattgacgccatccgccgggaatgaccaccggagacagaaaaacaaaaaccatctcacaagcaaaagttttcgaaaggccctggaatccaggctgcaaagccgggaagaaggggccggaatttttcattatcaattataccaaatcgttgttttgtataattgagtggaggcaaaaaaggcctcttccgggaaaacagtcgtttttgggcccttggacggcttttctgtccgctgggcctgtttgactgcaaattgtgttgttttttcgctgcaatacaatcactgttgtttttcacagtatttttattttgttttcatttcgtttttctggccggctcaaagtctccattccaaactgggctgagatttttgattgctgccgttccggtctggcctgggatctttttctcttgctgcaaaacaacgctccatatgcagctcatttgattctggcgtcttaaatcttacggctgcatttgattttctttcgttgatagtctttccagccgttttccggcctgtgcgccttccgccatgaaaaactggtggattttatggttttgtgctatagtattataatgtatcaaatatccaatccctttggcaaaggaagcaaactatggactatcgttatgaagcgccggaagaaatccgcaattacctcaattatatgagcaccatccggggccgttcagaacggacctgcaaagaatattacctggatctgcgtacattttttcgctttttgctgaaaaagcgaaaactggtcccggaggaaactccatgggaagaaatttccatcgatcaggtggatctgccgctgatcgccagcgtcaccctgaccgatctctatgattttctggcctacgctcaaaaagagctgcccacttatcacaaaagcccatccaccacctatggcaacggctccagcgcccgggcccggaaggttgcggcgctccgttccttttatcggtatctcaccgaaaaggtccataagctggatcacaacccggtgcagaatctggagtctcccaaaaacaaaaaatccttgccccgtcatctttctatggaagaaagtgtggagctgctgagccatgtggagagcgcctatcccgagcgggattattgcatcatcaccctgtttctcaactgcggcctgcgggtttccgagctggtgggcatcaacctttccgatgtgcggggagacacccttcaggtgctgggcaagggcaacaaagagcgaatggtctatcttaacgacgcctgccagcaggccatcaaagcctatctgcccaaacgcctcaagccccgtcccgaagacgcccaggctcttttcatcagccgggtggggcggcgcatcaatcagcagacggtgaaatggatggtgggccgtcagctggaaatggccggtctggggggcaaaaaatattccgcccacaagctgcgtcacaccgccgccacattgatgtatcagaatggtgtggatgtgcgcacactgaaagaagtgctgggccatgaaaacctgaacaccaccatgatctacacccatgtcaccgatgaaaacgtgaagcaggccgcccttcatagtcctctggcccatttttctccgccgcctaaaaaagaagacgatagtgagggaaatccagaagatcatccggagaaagcccagaaaaatcaactggtgtaatgctcttcggcttttcatctgtttctttgcgctttttcggcaaaaatcgaaaatattctgtaaagccaataagcttgtcagtcattgaatcataagagtaagacgccccttgcaaatctgcaatctgtttttcatacctcgcgggcttctcccctgctgttttcagcaaacaaaaggtgtttttccgaaaggtcagaatcccctcccgctgcattttccccagctccttggaaagggcgctgcgctccacattgagatagtcggccatctgctgccggtcaaagggaatggtgaactgccgttttcccgtccgcagagcttcggaggacagataggtcatcacccggccccggatggttttggccgaaatgcagaacacccggctggaccaggccaggttcttctgggtggacaaaatcagcacattccgcagcaatttatgataccagccctccctttcgttctggggagaaagcagcgccgtcagacgcacccaaagcacctggctttgctccacggccaccacatccaccatcataggcgcctggcaaaaggcgtaggtctcgccaaaggccccgccgggaagaatgctgtgaaggatcatccggttgccccacagatcgatgttttcaatgtgtattttcccagaaagcaaaatgccgaattcctctgttttgtcccccgtgtgcagcaaaacctcctccttgggataatcccccagacggatacacccccgccgggccatctcctcatattcctcctgggcaatgcctgcaaaaatcggatggtcgggcattttcataaaaatcccccatttcgttgttttaaccacatacttttttctgaattgtactatactgagttcatccaatcaagaaggagcgacggaaaaatgaaaagacggatcattgaaatagaccaggaaaaatgcaatggctgcggcgcctgcgcccaggcctgccacgaaggagccatcggcatggtgaatggcaaagcccagcttctccgggacgattactgcgacggcctgggtgactgtctgcccgcctgccccaccggcgccatcacctttgtggagcgggaagccgccgcctatgacgagcaggcggtaaaggaaaaccagaggaaaaagcagcaggcccagggcggctgccccggacaaagaatgcgccagttttcccgcccggctccggcggcccactccccttccttgcccggagaaagggtttcccagctggcccaatggccctgccagatcaagctggccccggtgaacgccccctattttgacggggccaggctgctcatcgccgccgattgcgccgcttacgcctacgcaggcatccatgaggatttcatggctggcaaagtgacccttatcggctgtcccaaactggacagtgtggattacagcgaaaaactcacccagatcatcgcccaaaatgacatccagagcgttaccattctgcgcatggaagtgccctgctgcggcggtctggaaatggcggcgaaaaaagcccttcagcaaagcggcaagttcatcccctggcaggtagtcactttgtcggtggatggaaaaatcctggacaagaccaactgaaaaagaaagaggcatttttatggataaaaaaatcaaaaacattccccatgaggaaatcgtgaccctgcgggagctggttccctgtcaggagggccaggtggtcagccgcaccctggcccagaacgacgccgtcagcgtcaccctgttctcctttgtcaaaggcgaggagatcagcacccaccgttcccagggagacgcctttgtcacctgtctggaaggagtgggtaaaatcaccattgacgggaaagaatatatcttaaaggaaggccagtccatcgtcatgccggccgaccacccccatgcagtctatggagaagaagccttcaaaatgctgctggtggtcattttctaacaatttgagcaaaggagccttgccatgaaggaaaaaatgttttgttatcaatgccaggagaccgccgggtgtgctggctgcacccaggccggcgtctgcggcaagcagcccgatgtggccgccatgcaggatcttctggtctatgtgacccggggtctttctgccgtgaccaccgctttgcggaaagagggccagctggtgagcaagcaggtaaatcacctgatcaccttcaacctgttcaccaccatcacaaacgccaactttgacaaagagcggatcgcagagcgcatccgctctaccctggaaaccaagtctgccctgctgggccaggtaaaagacccctctgcgctgccccaggccgcattgtgggacggggcgggagactgggaggaaaaagcccgtcaggtgggggtgctctccacccagcatgaggacatccgctccttgcgggagctgatcacctacggcgtcaaaggcctttccgcctacatggagcacgccaacactcttctccaggagaacgaagaggtggatgctttcctccagcgggcgctggccgccaccctggacgacagtctgaccgccaatgatctggtggctctcactctggagactggaagctacggcgtcaagggcatggcccttctggacaaggccaacacccaggcctacggcaatccccagatcaccaaggtcaatatcggcgcagggaaaaacccgggcattctgatctccggccacgacctgcgggatctggaaatgctgctggaacagacgaaggacaccggcgtggatgtgtacacccattcggaaatgctccccgcccattattaccccacttttcagaaatacccccatttcgtgggcaactacggcaacgcctggcacaagcagcgggaggaatttgaagccttccagggccccatcctcatgaccaccaactgtatcgtgccgcccaaggacagctacaaagcaagactcttcaccaccggcgccgccggttttcccggctgtccccacatccccggcggcatcggcgagaaaaaggacttctcccccatcattcagatggccaaaacctgtcctccccccacaccgctggaagagggcgagatcgtgggcggttttgcccatgagcaggtgttcgctctggccgacaaggtggtagaagcagtgaaaagcggcgctgtgaaaaagttcgtggtgatgggcggctgcgatggccgtcagaagagccgggaatactacacccggtttgcccagaagcttcccaaggacaccatcattctcaccgcaggctgcgccaagtaccgttacaacaaactgccgctgggtgatatcggcggcatcccccgggtgctggacgccggacagtgcaacgactgctattccctggccctcatcgccctcaagctgaaagaggccttcggactggaggatgtgaacgatctgcccatcgtctacaacatcgcctggtatgagcaaaaagcggttatcgtactgctggctctgctgtccctgggcgtgaagaacatccatttgggccccacccttcccgccttcctcagccccaatgtggccaaagtgctggtggagaacttcggtatcaacggcatcggcaccgtagaagaggacctggccctgttcttcggcgaaaactgaatcactgtcctatgcaaaaaactgcgccgcttccttgcggcgcagtttgagcgtgtcgaaaaagtggcttaggccactttttcgagtttttgcaaggggctgtatgcacgcctttggcgcacacttgccccttgagaagtgcaaaaagccacgcacaggtcgcggctttttgcggattgataggggtagggcaaatgatttttttcgctatataggtttttcgacagtctgaaaactgcgccgctttcttgcggcgcagtttttgtacgcatggaatttttacatccagtcctggatgacaccggcctcccgcatcagtttctccactacggtgccggaaaccactttgagcagcggttttttcagcagctccagcggcccgggcagccggacctccaggggggacttaccgtccatcagatgcaccgagctttgcagcagctcccgcacatcgtagacgctgccccacacttcgggcacaccccgatccacgcccagcagtccgtacaccgcttccatggcggtacgcaccgagtattcggtggtgaacacggtatcccggggggtatcggcaaactggcccaggaaggcaaagttgacgcagccatcgggaatcacatcgggccggtcgcccttccgccggggcatgaagaaggcggtgatatagggcatcatagtggggacgcactgagcgctgttttccgccagatcgtcaatctcctctaccggcacgcccaggtgatagagccactcctgggtgatctccttgccggtgcagtccttcatgggctttttcacataatcgccgggcacatcggtgaacaggccatagacccacacgcagaccttttccttatcctgctctttgaactggccctgccggttgatggtccagctgagcagccagctggagtcctggcagctgacaatgccgccggtgaccaccttcccggtgcgggggtcccgcttgcagatgttggtgatatagggcagaatccgatcgtccagcgtggtgatggtggccgactcccagttggtcttctgcacatcagagcagaatttctccggacggccaaaggccgggtcctgctttgcaatgttcttccaaaggttccagcaaccgctggtgcgcacttcggcgtccccattgggggcgtggtcctgatcgccgtaaatggtgccttcggtgcaggagccgttggtgacgaacaccaggtccttctcggtgagcaggatgcctttttctacaccatccaccttgcactcgatggcagtggccaccttcttcccctctttgatatcaaagagcacattggtcacctgggtaccgaactggaagtccacccccgcttcctccagatacttctgcatgggaaggatcagggattcatactggttgtaccgggtgaacttcagggcgctgaaatcgggaaggccggcgatgtgatgaatgaagcgctggaaatagagcttcatttccagggcgctgtgccagttctcaaaggcgaacatggtgcgccaataaagccagaaggtggaggaaaagacctcatcatcaaacacatcttcgatggttttgtcgtacaaatcttcgtcgggggtcataaagagcttgacgatctccatacatcctttttggctcaggttgaatttgccgtcggtgtgggcatcctggccccggttgacggtggcccggcagagagaatagttggggtcatgcttgttgagccaatagaactcatccagcaccgaagcccccggcttttccagcgagggaatggagcggaacagatcccacaaacattcaaaatggttttccatctcccggccgccccgcatcacatagccccggctggggtcaaagatgccgtcgcaggcgccgccggccacatccatggcctccaggatatgaatgtgggaaggcggcatctggccatcccgcaccaaaaagcaggccgccgccagagaggccaggccgctgcctacaatataggcgcttttttcctccaccccttccggcttttccggccgggcaaaggcttcgtagttgccatttgagtaatagatgcccttgctgtttttctcctgctttccccgctcggtgttctgccagtcgctgcggtccggcatctgacaggatggggcttccgtctggttgtttttctttttctttgccagcatgacagctgctcctgctccggtgagtgcggcggccgccgcagccatcttggccgttgtttttttatccatagaataagaacctgcctttctgtttttctttctgtccttatcctaccccctttgggtacacaataccatttacaaaaagagtctggtgataaaatttttatcatcccgccctttttgtaaagcgattcagtttttctctgcgaagttctggatggagtgggccacggtgccttgcagcgtggtgctcatcttctcaacgatcaccctgggatcggcggtcataccctgacgaatccaatccagcatgatccccacaaaattgtatttataaaagtcggcaataaaggatttgtcctccggggaaatctccaccccctggcttttttcttccaccacgccccggatcaggtcgtaggtgagcttatggagaaaacgctccatctgatccctgctgatgcaccggtaggcattcagtacaaagaccttgttttccagcacgacctcaaaaatttgcagcagcccttcctgccaggtgtcataggtctttttcccctgtaaggcccggcccgcatcctcgatgcacacccattcgatgagatcatagatgtccttgaaatgataataaaaggccatgcggctgatgccgcagtcggtggtgatatcccggatggtgatcttgtccagggccttgacctgcatcagctttttcagcgattgctccagggcctgctttgtggtgtttgccataacaatgctcctttgttctgtggtcatcgggacaggggatgcagtctgcggtagcgttctccctgctctccttccagggcccggaaatacacctgcacccaataagggtcatccagccccagaagggcctttaaatcctctgccgtggcccccttctccgccagatgaacggccagggaagccctcagcagctgaggtgtcaccggcagggaaagacccgcctctttccccctccggcctaaaatcttccataatccctggcgggtcaggcgtttcccagcggcgttgaggaacagggccggctcctccacctggctcagcaccccatcccggcaggggcccagataatccctcagcgcctccacggcctgggggtacaggggcaaaaagggctccggccgctccggaacatggagaagcccccgctccaaaagcacctggtctgtgttgagggcagtaagctgggcacttttcaggccggtggcatagagcacatggaacatggcccgatcccgccgggcggcaaaggactccccttggggggacgccagcaaatgccgcacctgctccagagtgaggaaagcgggcaggttccctttgtgccgctccaccgtcagacgccggggcaggttttccgccacaatcccccgggccatgagaaaagcataataccgggacaaagaggagcgcacccgggccagggtggcatcggagcggccccgttgtttcagctctgaaaagtattcctccagctgcttttgtgtaaccgtctcataatccccgtcttttttcaagcccaaaaaggcatccagcgccgccacatcccgcagatagacctggctggtatggggagaagccggggtattttgtttcagatcatccagaaaagcatcaaaccggctgtccatgttttctttcctttcttctttatcccacccaggccaaggcggcccggcaaaaccagggggccagcaagctgcccaaaaagctatacaccaggcagagcaacaggcaaagcagcgctgtgcgaagataatccggggaaatgggccggcgtttcattccccggcggcgccttccctttcttcccggcgctttcttcaaagcctgacgcatggcattttctcccagctccagcatgcagagggtggtgagcagcgcgccccccgctcccagcaagagggaagcggcatagccacccaggccgtaatcccggcagaactcccccacccagcaggccaaagtgaatccccggacgccaaagagcagcagcaccccataggccccgaaggaaaaaagcccgcagcagaacaggggcagcagatagagaagaaactcccccagcaggcggaaaaacagccatagccgtccttctccagcccattgctccaaggaaagggccccggtcccttccttctggaacaaaaccatccaaatgcacccggccacggcccccagcaaaaggcatccggtgagaaccaacaagggaaggggcggcaagtccttttttttcattcttcctggcatcgtcttttcacctcgcccatctatacggcgaagcaagcgaaaaaatgcctttcttttattatatctggttttttccctggcgcaagatggatttttgatttctgtaaactgttttctgtaaactccatgcttttttatcccctctcagagccggtttgtgcaaaaaagtgagaaaacaaaagttcttcccattgttttttgtgcagtgttgtgctatcctcaaaagggatgggtttccccttccctattttatgatttcagatcacaaggaggtcagcaacgatgcaaaccatcacatctcccaaggagtttttcggctttgacctgggggccgattacaagatcgcccgctgggatcggatcgtggaatactacaaactgctcagcagccagtccgaccggatccaggtgaccgaaatgggcccctccaccgagggcaaccccttcctcaaggtcatcatcacttccccggaaaacttcgcccatttggaggagctgcgtcagatcaaccagaccatcgccgatccccggggcctgtctccggaagagatccagggactggtgaaaaagggcaaagcggtcagtgttcagagcatgagcctccacgccaccgaaatcggcggcacccagatggctcccctgctggcctatgacctgctcaccggcgacagcccggagatccagaacatccttcagaatgtggtgctggtgatggtgccctgcttcaaccccgatggccagatcatggtcaccgattggtataactccaccctgggcaccccctatgaaggctgcaactacccctccctctatcataaatacaccggccacgacaacaaccgggacgcctttgcccataacatcgtggaatcccaatatgtaggggacatcctgttcaaggaatggactccccagtcctattttgatcaccaccacatgggcagctatggcgcccgtattttcgtgccgccttataaaaaccctgtccgtccttacaccgatcccctggtgtataacgagctgtccctctatggggccaatatgtgctaccgcatggagcaggaggatctgtccggcgcttccatgatgtctcagttccccggctggggccactatggctaccactggatcacaaacagccataacatcgccggtatgctcagcgaaagcgccaatgccaaactggccaccccgctgtacatccaccccgaacagctggaagggaaccatgacaagtccacccccttctatggtcctcaggtgcacttcacccatccctggcccggcggatggtggcgtctgggcgatattgtcaagcgccagtactgcgccgcctataccgtgctggacaccatggccaaaaaccgggagcagatcctttacaacatgacccagaaggcgctgcgccagacccagcggggcagcgaaagccatgagcaggccttcctcattccggaaaaccagttcgaccgtggtgtactgcgcgtcctgctgaagattctgctggatcagggcatcgaaatcaagcgggccacatccgatctgtcggtaggcgccgtcacttatcccaagggaacctatgtgatccccctggcccagcccaagatgggcgtcgtgatgaatctgctggcccgcaccctctaccccgacaacttctggacccgggatatgcaggatgctctcaccgcttttgacaccgccagcgataccgtggcggaatacatgggcgtgcaggtcatcccggcggatgctccggtggaaggagagcttgctccctttactgctctggattgtatccccctcacttccctgccccaggcggcaggctatgtgatctcagcaaaggagaaccggggttatcacgcagccaatctgcttctggctcagggcttcccggtgtggcgcatcgacacctgcccctggcatgatttctatgtggaaggggatatcaaaaaactggcccccatcttcgatgccgcccaggccaccgtccgaccggtggaaaaaccctatccccagatgaccccgttgaagcccctgcgggtggctatgtaccagcgcttctacaccggcaatgccgacgaaggctggacccggctgctctttgacaacatggcttattcctataccaccgttttcgatgccgacatcaaaaacggcaggctgaaggatttcgatgtgctcattctgcccagcgattcctatgagatgctctacggcgtaatgcattatgccggctctcccaaatttgacggcatgatgcagtacatcagcaaacagccgccagaaaagcagagcggcctgggcgatgaaggcatgaatgccatccgctcctttgtggagcagggcggcaagctgctggccttcaaccagtcctgcgactttgccattgaggcctgccatctgaaggtgaagaacctggccaaaggactttccgccaaggaattcaacacccacggctccaccctgcatatggaactggacacccagaaccccctgtgctatggcatgcccaaggaagccctggcgtttcactgggatggtccggtgctggcggtgaaagaaaagtttgacgcccagcaatatcaggtggccgcccattacgccaaggaagatgtgctgcaaagcggtctgctcaccggtgaaaaactcatcgccgggaccccggctttgctccaggcccattgcggccagggcgaagtggtgctctatggctttgctcctcagcaccgctgccagacccacggcaccttcaaactggtgttcaacgccctctaccgctaaagtgcctcgaaaaagaggtcttggcctctttttcgaatttccgcaagggtctgcgtgcacgcttttgcgcacacttgtcccttgaaaagtgcaaaaatccacgcacaggtcgcggctttttgcagattgattatgggaagggcgacctgtttcctttcgcaatctaagctctgtgaacacacaaaaggcccgccgcttccttgcggcgggccttgttgtgctccgaaaaccactcgctaggcgagtggttcaaaaaaagacttatgtcga

SEQ ID NO: 4625 - DNA, 10952 bp, Unknown
  16S sequences of unknown bacteria
gatcgttccgatgttaatatgcggtttatttctctcaaatttttccttagccatttgcctgttcctcctctggtgctgatctcacctgttcttacaacgaatttgacttacattttaactttggagctgcctagcagacttgaactgccgacctcttccttaccaaggaagtgctctacctgctgagctaaggcagcgcattccgctgtcttctatattctaatcattttctcatttgctgtcaataatgaaaaactcctgcagccgcgaatttaacgggttttttaacgagtgtgccgcaattcttttaaaatattgaaattttcagattttatgcccggttcaacggcaaaacttccccgtttaataaggaagaaattattgcaaaagtctgtcctgctccttgctatcaaagtccgtttcaggcaggctctgtcctgcggacaacgtcttcctccagcgttccgggagtttttacagcattggtccccgcaacagcttccctgtttatctggacagcatcggctccaattttcgtttcgccctggtaatcgcattgtccacggccttcggcgtcttatttgtaagttttgcaatttccgtgtaagaaacacctttaagatagagatcccacactttctgctcaaaggaacttagcagctctccgccgtttctttcgatataatccagcccctcccgcagcaggagcatcgcttccggatcttcgctggcatttgacataatcgtatcttcaagtgtagcgccctcttctccgttctcagagaagggattgctcagagacatcgaattgtttaagggcgaatgtttgtaacgcagcgcggcttttaccgcggtgacaatctgacggttgatacacagatctgcgaaagtggaaaaggacgctcccttttccggatcgtagtcccgaatcgccttgaaaaccccgatcatgccttcctgaatcacgtcgtctcgatccgcacccgccatataatacgacgacgcgcgacgctttacgacggtcttgtatttctgcagaagagcctccgccgcgctgtcgtccccttcgcgcgccagtttcaccatcttgtcgtcccaattcttgtccgccacccgtgcctcctgacattcacttacacattctgttattctccccgcggtttttccagctgcacactttccctgccggtcagccgcgctccgtcgcttcggctgcgcagtacttcgtacatgaggatggctgctgcgttcgacgcattgagagaattgactccgcctttcattggaatagaaacacagaaatcgcaggtctctttcaccagccggctgactccgctgccctcaccgccgatcactaaagcgatcgcaccgctgagatccgtctgtatataagatgctccgtccatatcgacggccgccgtccacacgccttccctcttcagatactgaagcgtctgcgcgatattggaaactctggcgacccgtatataagccgacgctccggcggaggatttctccgccgcggcagtgaccgtcgcagctctcctcttcggaatgatcacgccgtgagcccccgcggcatctgcggttctcatgatcgcgcccagattatgaggatcctcgatcccgtccagaacgacgataaacggcggctctcccttttctgctgctgcgttcaggatatcttccggttcgcagtattcgaaatcagaagcatacgccgccaccccctggtgaggcgcgcccccggtcacccgatccagggtgctgcgttccgcgtaacttattatgatacctttttcccgcgccattcctatgatttttctgacagatccttccgcgtctttcagaatcaaaatgcgatcgattcgccggccgctcttcagcgcttcgattaccggatttcttccgatcagaaggccttctttctcaaaagactccgcctgcccgcggtcgtatctttccggcgaagcgccgcggtttcgtttttcacggctctgcaccggcggtctgatctccatccgctctcttccgccgcccggcttatccgaacccggacggtctccgtacggattgcttctgccaggattaccgcggccggaacgtttctttttcttttctgacattactgacgtctcctgtaaaccgtaaatacgtatgatacgccgttttcttcgatggtatcgctttccgccgccttatcccagtccggcagatcacggggcagagtaatacgcgtatcagcgtcgaaaaccccgcggatttccgtgaccagcgcttcattacagtaaggcagaagctgatcgtagatctgtccgcctccgatgacaaacagatcgtcggtattgtccgaggccgtgagttccatcaattcttcaatcgaacggcatacctcgtacgcatcgccctctggcagcgtacgcgagagaacgatattcctccgctttggcagaggctttcctcccgggaagctctccagtgtcgctctgcccataataaccgtctttcccagggttttctcccggaaatatttcatatctgcaggaattcggacgagaagcccaccgttttttccgattccgccccgctcgtctgcggctacaatccacttcatagacgtatcctttctgagtattcaatctatcattttacacaccttccggcagccgcggcagactgcattttacggcagaaatccgaaaagtccctatctgcgaagagaagatcccggcatcactattctgccacagggatattttttatctgcggtcctgcctggtaattttccagtttgaaatcgtccaatgtaaattcataaaaatccttcacatctggattcatctcaaatttcggcgcaggatactgcgtcctcccgatcagttcctctaccaaaggcacatgtttgtcataaatgtgcgcgtctgcgataacgtgtaccaattcccctgcttcgtagccgcagacctgagccagcatatgcacgaggacggcatactgaacgacgttccagttattcgctaccaagacgtcctgcgagcgctgattgagtatggcgttgagacgattgtctgtcacgttgaacgtcatgctgtaagcgcagggctccaggcccatcttggaaagatcttcgaaattgtagatatttgtcataatcctccggctcgccggcgtgtttttcagctgccagatcacgttgtccacctgatccattctcccctgccgaaagttgtactgcttgcccagctgatagccgtaagcctttccgatcgtattatcttctcctgcccaggcatcccagatatgactttgaagctgtgtaatatcattcgtcttcttctgccagatccataacaattcgtcgatagcgtttttccagcccgtagggcgcagtgtgagcgcagggaactcttttgacaaatcgtagcgattgacaataccgaaccgcttgatcgtatatgcgctggaaccgtcttcccatcttgcccgcacatcctgcccctctgtggaataaccgttatcgagaatatctctgcacatgtcgacaaatatcgtatccgctttgctcatagttagaaaaccttatcgccctttctgatttttctctttttcactcatttcctgtttccgcgatccaccgcgatatcgctgctttcgatgatttcaaacgttctctgtataatctctttttctctttctgcgtctcctgagagattcaagtagcccagaagcgcttcgaatgccgtagcttttttatatgtcagctgattcacattatgaggcatggaagtaatcttatgattttttcctctgcgcgccaccgcccgttcatccggtgacagctcgtcccagatgacgtcgaaaaccgccgcctgcgcctccgctctcacataagccaccgacgctttgtgcagcctgtccggccgcagcagcccctgctgaaatacatgtctgcgaacatgaatctcataagccgcgtcgccgacatatgccaaaaccgaggtattcaccagcgagatcccgcgttttttttctgtattcatatcacctgtcatttccgttttgttgcatctctttcatcgttttcttccggtctaccgccgtctgcgagtccggatcacacttccctcttcggccctaccattttctccggctgcacgaaccggtcgaattccgcttcggacagaagaccggtctttaccgccgcttccttcagagtgatgccctcacggtgagcggtctcggcaatcctggccgcattttcatagccgatatgagaattgagcgccgtcaccagcatgagagatcttcccaggttctcggcgattctttcgttgtttggaagaatcccccgggcgcaattcgcttcaaaggatacgaccgcatccgacaacaggcgtacagattgaaggaaattataaatgattaccggcataaacacgttcagctgaaaattcccctgagatgcggcgatacccacggccgcgtcatttcccatgacctgaacggccaccatcgtcagagcctcgcactgagtcgggttcactttgcccggcatgatagaacttcccggctcgttttcggggataaaaatctctcctatcccgcagcgcgggccggaggcaagccaccttacatcgttggcgatcttcatcagatctgccgccagcgctttcaggctgccgtgaacaaacaccagctgatcctttgacgtcagagaatggaatttattgggcgccgtcacaaatgcgagacccgtcagttccgagataatagccgccgtctcttccccgaatttttcgtgagcattgagtccggttcccacagcggtaccgccgagagccagttcacgcaggctgtccgctgcctccgaaataaacttcctgttctttctcatcatttccgcccagccgctgatctcctgccccagagtcagaggcgtagcatcctgcagatgagtccttccggtctttataagatctccgtacttttccgaaagtccgtcgaatgtcttcaggagcctgtccaccgccggcagaagccgctcgtgtacagcggtgagagcggcgatgtgcatagcggtaggaaaggtatcgtttgaactctgagagcaattcacgtgattgttcggatgaaaagacggttttcctcccgtaatctcggacgcccggttggcgataacctcattcacattcatattggactgagtcccgctgccggtctgccacactgataagggaaaattttcctccagtctgttttcgagaatctcatcgcatactcctgcgatggtctcagcccggagacggtcgagcattcccagtctgacattggccaaagccgccgcctttttcagaattgcgaaagcgcggatgatttcctccggcattttttccgtcccgatcctgaaattcatataactgcgctgcgtctgcgctccccagtatttatccgcgggaaccagaacctcgcccatcgtatcgtgttctttcctgaatccgctgttatccatatgttttcagccctctcataaatcatcaaaacgtttccccgcgcatatcctcacacgccgcaaactatccgtcttgcacgtttaaatcccggccctgccgctcttcaccgcctcttctgcgacagcttttgccaccgctttcgtcacttccggattaaacggatccggaagaatataatccgcggtcatctcttcatcggagatgaccgaagcgatagcgtaagctgcagccactttcatctcatcggtgatttccctcgctctcacatcgagaacaccgcggaaaattcccggaaagcacagcgcattatttacctgattcggaaaatcgcttcttcctgtaccgacgaccgccgctcccgccgctttagcctcatccggcataatttcaggcaccggattcgccagagcgaaaataatcggctgctccgccatagtccgtatcatatcctgagtcagcgttccaggaacagatgcgcccacaaagatatccgcatcccggaccgcatccgccagagtacccttcagctttcctttatttgtcacctccgccatctgctgctgaggttcgttgttatccggatttccatcccagagaatgccgaaacggtcgcacatgatgatttcaccgaaattcatcgtcagcagaagacgcgcaatggaaatccccgcggcgccggcgccgttgactgcaattttcagttcccccatcttcttccccgtaaacttcactgcgttcagcagacctgcggccgcgataatcgcagcgccgtgctgatcatcgtgaaataccggaacgtcgcactctctgatcagagtctgttcgatctcaaaacatctcggcgcggaaatatcctccagattaatgccgccgaagcttttggagatatttttcacagtctcgataatcaccttcggatctttagaatcgatgcagatcggaaaagcgtcgatgtccgcaaaccgtttaaagagcgcgcatttgccttccatcaccggcatcgccgcctccggcccgatatcgcccagtccgaggactgccgtaccgtctgtgatgaccgcgacgatatttccgcgtctcgtatagtcgtaaacccgctccttttgatctctgatcgccaggctggcagcggctacgccgggagtatacgccaccgccagatcctcgcggctctcgatttccgcccgggagatgatttcgatttttccgccccattctttatgtttctttagcgcaagttcattgatatccatatctattcctccagaaaaactgttttctaccggcacagccgccggcatctcccgccgctgtgctgaaatcactgagtcgaaactttcatcttatctctgccggcctctgcttctttgggatatttcgtccaaattattcccgtctcctggactcagcttcgtttttttccggcacccccgcgctttccccgcgctgatccgacagatctttcaactgagaagcagatttcgcggaccgcgcttccgaggcggaagctgccggtgattcttcgtcccggcgctgtgcctgatattcgcaaacccgttttttcaggccgtcgcaaacacagtgaaaagttctgctgccgagattccggcttttctttttacgttcgaagggattatcgtcaaattcatcttcctcaggctgctccgcaggctggtgaagactgggatccatcgcctgcaaaccgcgatacaccgcggtatcatacggaagatccttcttgcgcagcccccggtttacccagcgggtcaccagcatgtaaacagtggcaaacacaggcacgccgagaagcagtcctgcaaacccgaaaaagcctccgcccacgagaatagcgaagagcacccaaaaactcggaagtccggtagaagtgcccagcgtcttgggtttgatcacattaccatccaactgctgaacgacgacaatataaatgagaagatataccgtctttaccgggtccaccatcaacacgatcagcagactcggcacggcgccgataaacggaccgaaaaaagggatgatattggtaactccgataatcacactgatcatggtgatatacggcattttcatcacggtcagcgctacaaaagtgatcatcccgatgatcagagaatcgatgatgcttccggagataaaccctccgaagatccggtgaacccttctggtatcggacagcaggtgattggccgttcctaccggaagcacactgtagaccagctttttcgcctgagcgctgaatttttccttacttatcagaatatagacgcagacgatcaggccgataatcagatccacaaagaatcctgccacattgatcagtcccatggtgatactgcccagggccccggtaaaataggggatcacattctcccttatgataaaattcagattcgtttccgctgtctgcaaaagatcctccgccgcctgcagcagcgtcggattatctttcagtagctgaactatctggtctgacagtttcgccaagttaggcggtatcgtataggcgatagagatgatactctggataatctgaggaagagccagcacggccagtcccaaaaccaccgtcaacatcagaacgatactcaccgtcacggcaatcgctgtggacagaccgtctgcataatactcgcccatcttctttttcagccggggcatcagcatccgatagatagaattgtacaccggaagcagcagataggctatgataatccctataatgacaggcatcaggacgttcagaaccgttccgatatgttttttcagcgacggcatctgcgtcataatcaggtaaaacgcgatactcagacagataactgccagagcggtaattccccaggacagattatcttctgttattttaactctctttttgcccatgatatgcctccgcaaacgcgatcctgtcaggcagagtctcctctgcaaaactcagctgcgctgatatgattgaacttcgtccctctgtctataaatccgcttataagcccgcgttacagttttacgaccctcggcccctgaggcgtatcctctaccgcaagtccttttgacttgagaatatcccggatttcatcggcccgggcaaaatttttcgtctttctcgcttcctgacgctcttcgacaagagccaggatttcgttagaaatcccgtcttcctcctcatcctgcaaaattcccagaacaccggtgagctctctcagaagctccatgcatccgcccgcgaattcttttgacgctccgtccttcaccgcggtattgatatcgcggatcagctcgaataccgcgctgatcgcatctgccgtattgaggtcgtcttccatcgcagactcgaatttgtctctgtatttcccgagtttttccagttctgcggattcagcctccgtcatgagatccgaaccatttctgatcagatgctccagattctgtttggcgttgtgcatacggccaagggcatttctcgactgtgtcatcaattcctcgctgaaattgatgggacttctgtagtgcccgctgagaagaaaataacggatttcctcaccggtataccgcttcagaatatctctcacggtgaaaaaattacccttcgatttcgacattttctcgttgtcgatcgtgatatatgcattgtgcatccagtaattggaaaatttctttccggtatacgcttcggtctgagcgatttcgttttcatggtgaggaaacgccaaatcctgtcccccgccgtgaatatcgatagtttcccccagatatttattggacatcgcagaacattcgatatgccagcccggtcttccgaacccccatggactctcccaggcaggttctccgtcgatttttctcgccttccagagagcaaaatccagcggatcctcttttttttcgcctacgctgatgcgggctcccgcctcgagatcctcgatattctgaccggaaagtctgccgtatccgccgaatctccgcgtgcggtaataaacgtcaccgtcggcttcatacgcgtagcccttctccacgagagcttttacaaaagcgatgatctcatccatattttccgtcaccttcggatggactgtcgccttttttaaattcagcgcttctgcgtccctaaaatattcgccgatatatttttcgctgatctcccgggcgctgacaccctcatcaagagctttgttgataatcttatcgtccacgtcggtaaaattctggacaaactttacattcttacctttatattccatataccggcgcatcgtatcaaatacgactgccggacgggcgttgccgatatggatataattatagaccgtcggtccgcagacgtacattttgatttcattttcgtcgatcggcacaaattcttcttttcttctcgtcatcgtattatatattttcatcggtcgttctccttctctgaaatcctgcagatacggctgcgccttcttccggccgcagggaatctttcggcataaatcttcattaataactaattatatgacgaatccacggacagagcaatgaaaaactacagcgacaaaaaagtttccaaaagaaccttttttgcataaaaaaaggacagacatctgttttttactcatctgtctgtcctctgacgatcgtatttttttattgcaaaccgttttattaaactgtctctacccgaatactcttcatcttctgttcctgaagcggcttatctctggaatctctcggcgtccacacgatatcgtccgccgtctccatgccttccagaaccattccgaaagccgcatattcgccgttgaggtgaggagaatcctccaccatgatgaagaactgcgagctggcggaattcggcatcatagaacgagccatggaaagaacacctctcgtgtgcttcagatcatttttaaagccgttggaagcgaactcgcccgggatcttcgtaggagatccgcccatgcctgtgccctccgggtcacctccctgaatcataaaatgaggaatgactctgtgaaagatcagtccgtcataaaaaccgctgttcgccagctcttcaaaattggcgcaggtaatcggagcgatctccggatagagttcgcctgtcataatgccgccgttttccatttcaatcgtaaactttttcatccgtcttttcctttctctcgcaagaaactatgctaaatgcgctgtcagcgccgcttttaccagttctgccgcatccgctgccgcctgctccgcagacttttcttcggtatctccgccgcttctcagtctgtattccacaataccttccgcagcctttttgcctaccgtaatccgcaccggaataccgataagatcggcatctttgaatttgacccccggccgctcgtctctgtcgtccacgatgacttccacgccctgcgcgctcagttccgcctcgattttttccgccagagccatctgctc

SEQ ID NO: 4626 - DNA, 9442 bp, Unknown
  16S sequences of unknown bacteria
taaggaaatgagcgaactcttcgctgtggaaaaactggaaatggaaaacgaatattcctctgtatgcccccactcgggacagaccgtccaccgcagcgtgccgaagctcagcgttaaacagagaaaaatcattttacagggaggcgagcccgatgagcagtaagtttaaagcgaccgaaaatcaacaaaaggccatcgacggaaagggctcgctgctcgtgtccgccgccgccggctcgggcaagacggccacccttgttgacagggtcataaaaaagcttaccgaccccgaggacatgtataaaattaccgaccttctcatggtcaccttcacaaaggctgccgcctccgaaatgcggtcgagaatttccgccgctcttaacgaaaagctgtctcaagacatttctcccgttctaaaaagacatttgagagaacaggccgttcttctgccaaaggccgatatttgcaccgtcgactccttttgcaagaatatcatatccgacaatttcgacgtcctttcgctccccccggatttcaaaataattcccgacccccagcttgccataatgaaggaacaggcgctgaccgacacggtggagtattttctgtcggtaaaaaagacggagttttcctccctcatgaaattacttgccaccgattcgagacttgaaaacatacgctcggtcatttcgctgatccacgattatatgctgacccttcccttccccgaggaatggaaggaagattgcatttccatgtatcggggcttttcctcggcggaaaattctgaatggggaaaatatatgctttcctccctttacgcaagatttaacagcaccgccgaccttatagaatcggcattaaacgacatttcccgagacgacgtgctgcgtgcaaaacgctcgggcgaccttgaaacgtgccgcgattactgcctaaaaatgtgcggcaaattaaaggaaggctcctttgcggaaattgcggattttgccgcggcgggaaaacccgtcagatggagcgagaagctatattcaaaaaaagaaaatttcgacccgtctcttgccgaaaaggccgagcaggtcagagccaaatttgcaaaaactctcgaaaaggcaaggaaagttcttatcttttcgcaaaaggactgtgcaaaggaggcaagacggctcaccccgtatatagagctgctttttgaagccgccgaccgttattccgaccttcttgcggctcaaaagcgggaaaaaaattatcttgattttgccgatctcgagcacctgaccctaaagctgctcgccgtcagagaaaaccgaaagacgactctcactcccttcgcaaaaaccgtttccgacagattcagggaggttcttgttgacgaatatcaggacacaaacgaccttcaggacgagattttccgcataatctccgacgaccgcaaaaagcttttttgcgtgggagacgtcaagcaaagcatctacggtttccgacgttccaacccgaaaaattttctttcgctgctcgacagctatgatacttttgacggaaaaagctgccgttcgaaaattattctttcggaaaatttccgaagccgaaagggcgtttgcggcgccgttaatttcattttttcaaaggtcatgtccaaggaatgcggcgacatcgattataacgaggagcacgcactaaacgccgcggcgaaattccccgaaagagacatgaacgatgtgcagatcgacattatagaccttgatgaacaggacgaacgaacaattcttcaaaccgaggccgaccgagttgccgaaattataaaggatatgcttgaaaaggaatgtatatcccgaaagggcaagcttgaaaagccgaatttcggcgatttttgcgttctcatgcgcaccgtcaaggacacggccaagccctttgccgacaggctgtcggagcacggaattccctgttcatattcccattcggaggatttcttttccattcccgaggtttcgaaaatgatgtcggttctcaaagttatcaacaatccccttgacgacattgcgcttttgtcggccatgatgtgcccgattttcggttttacggcaaacgagactgccgaaatacgcgcaaaaaacagaaaatgcaatatgtactcggcgctgcggctttcggccgagtcgggaaataaaaaggctcgggactttctcggacttgtttccctcctcagaaaatattccgccacccacaccgtcgaccgccttatagcaaaaatatatgacgacaccggccttcccgaaatttatctgaccgaagacggcggaagtcttaaaaggcaaaatctgctgcggcttcgggacatagcccttgaccgcatcaacgagggatatgataccaatttcgaatttctgcgctttgccgaaaaggtgcaaaaaggagaaataaagctgtcggccgacccctccgacggcgagggcggcggagtgcgcataatgagcatacaccactcaaagggattgcagttccccgttgtttttctcgcgggactgaccaaaaagaaaaataccgacacatcggcctttcagcttgatcaaaaatacggtgtgggtcttaaaatctatgacccgagcacccgaaaaaaatcctccacccttatgttcgaggccgtaaaatcggcaaaagccaaaagcgaaagctcggagcttttgagaatttactatgttgcggccacccgcgccatagacaatctttttataattgcctgcgaaaagaacgcggaaagcgcccttaaaaacgcctcggcagcgcttggttcggactacggcgggaaaaaccgtcccatcgacccaattatcgtggaggacgcgccctccttttcgtctcttgtctactgctgcgcactgcttcatcccgacgggaaacaacttcgctcggagcttggcgcgaatttttctcccgacgacgccgaaagcccgataacggtcaatcatcttcattcttccgacgtggaaaaaagcgttgaaaaggagaccgaaacggccgttttgtcggaggaagtcgacgaagaatatctcgaaaagcttaaaggcgacatgaaatatgaatatgatttcaaggcgctgtcggctctttgtgcaaaaatttcggtgtcggcgctgacccacaaatcaaaactcagcgaaagctttgcgatgcgtcccgcatttttgcaaaatgaggcgttgtcggcggcggaaaagggcacggcaatgcacagctttatgcaatattccgattatatctcggcgaaaaacgatttggaaaacgagatttttgtgcttaaagagcaacggtttctttctcccgttcaggccgactccctcgaccgaaaaaagcttgcggctttctttgaaagtgagcttttcgcacgcatggaaaattccgaaaagcttctgcgtgagcagcggtttattatggaaattcccgcccgccgtctcgatccctcacttcccgaaaaggttgcaaacgagcctattgccgttcaaggtattgccgactgcatattttttgagaacggacagccgataatcgtcgactataaaaccgaccttgtaagcgacgaacaggttttaagggagcgatattcggctcagcttgacatatatgccgaggcctttgaaaaaattctgggacaaaaggtcagacaaaagcttatatattcctttgccctttcaaaaacaatcgagctttagacaaaatccccgccttaatcaaggcggggatttttttatgtgcgtcagccgaaatatttaaaacagggcatatattcaagcttaaacttgcttatttccctcatgcggtctatcttggccttggtgtcggggtcgggctcgacaccctcgcggatgtatttgtcgagagttgcgtatgtaaagccgagattgtcctcgtcggttttgccgcaaagcccgtcgataggcggtttttcgataaatttctcgggaagtccgatgtatcttcccatggccttgacctcggtgacggtgaaacaggaaatggggctgaaatctccggcgccgtcgccgtagcgggtggcgtatcccacataatcctcggaatagttgcaggtgtttgccacgcgtccgttattggactgggaaacggcataaaccgccgccattcttatgcgggcgggaaggttaaaccttgtctgctgcgtaacctcaaaggactcgccgatagccttataaactccgtccaccgcgtccttaatgttaacggtataattctttatgccgagaaattcgcacagatcctttgaatagtcaatgtcaaactgctcgccctgtggcatcatgacgccgataacacgctcttttccgagagccttaacgcacagcgccgccgttatcgagctgtccttgccgccggaaattccgagcaccgcattacagcccttgccgttttgctcaaaccaatttctgatccattccacgcatttttcggttgcgtcctttgcatcaaatttatacatcttcctaacctcgctttaataaatattaaaagtcgcaagactttatttcaacgttatgacggtcacgccgtcctcaccctcgccgtacattccgcggcggaaactttttacgcttctgtgggtcttaaggtgggttctcacggcgtttttaagcacgccggttccctttccgtgaatgacggttattgtctccacacccgaaagcagagccccgtcgataaaattgtcaagctctataatgccctcgtcggaggccattccccttatgtcaagctcggtggacacctttcgcagagcgcgggattccacacccttgaccgacctttctttaaaggactcgggaataacgttcttttcgctttcgagaagccgtagattatcaaccgacaccttggtctttataatgcccgcctgcacaaagcagctgccgcttttgtcgggaagggacagcaccacggcatttttgtcgatgtcggcaattagcacgttgtcgccgattttaaggggtcttggcagcttatatttcgaagaagtcttttccaccgggtcggccgccttttcggtcttttcaagacctcttttggccgccgccttagcacgtcgcagcatttccgcggcattttcggtttttgactgcttttttatgtcctcaagctcgtttaaaagtctcgacgattcggctcttgccgactcggtaatgtctcttgcctgttttctggcgttttcaagaatttttttgcgttccttttcaagattttcccgctcggcctttgactttctttcaagctccttggcgctcgaaagaagctctctcgcctttgcccgctcgctttcaagtcctgcgtgggactgctggagcgtttcgacaacctgctcaaatcttcttgtttcgccggaaatgagtccctttgcctcgttaatgacgctttcgctcatgccgagatgagaaagaatggcaaaggcgttggattttccgggcagacctataagcaagcgatatgtggggcttaaggtgttcacgtcgaattcacagcaggcgttttccacccccgccgtttcaagagcataggccttaagctcgggatagtgtgtcgtggccgcaactctcgctccccgacggcgcatttcgtctatgatcgccgtggcaagagcggctccctcggttgggtcggtgccggcgcccagctcgtcgagcagcacaagactttttccgtcgcacaccttgaatatctcgattatattcgtcatgtgcgccgaaaaggtggaaagcgactgttcgatgctctgctcgtcgccgatgtccacaagtatgcggtcgaaaaccgccacgctgctttcgtcggcagcgggaatcatcattccgcacattgtcatcagcgtcaaaagcccgagggttttaagggtcacggtttttccgccggtgttgggtcccgttatgatcagcgtgtcaaaatcctctcccagcctgatgtcggtggccaccacctttttggggtcaatcagaggatgacgggctcttttgagatttattttgccttcgttattgacaatcggctcgctggccttcatgtcaaaggcaagctttcctttggcaaaaataaggtcgagacggataacggcctcatatcccgccttaatgctttcggcaaatcccgccgcctccgacgacaactcggcaagaattcggtcgatttcctctctttccttggcctccaaaatttttatttggttgttggcctccacaaccgacataggctcgacaaaaaccgtcgaccccgtcgaagaggtgtcatgcacaagacctgccacctccgagcggcactcggccttgacgggaacgacaaatctgccgtctcgtatggtgacaatgggctcctgcaagaacttctgcaccgtttttgaatgtatcattccatcgagtttatctcggattttgtcgccttgagccttcttctttctccttatgtcgaaaagcgcgggagaggcgcggtcgcttatttcctcctcgcttataatggcgtcgtttattctgtcctcaagatatttgttgggaaaaagcgccgaaaaatagggcatcagagccgtatcgtcgggacaatgattatccctccactgggacagcgagcgaatgaccctcagcaccgaggcgacattcaaaagctcccccgccgaaagaactccgccggagcaagcgcgggacagctgaccgttaacgttgacggttccgccgaaggagggcgccgagtatttggcaatcagcttataggccgaaagagtctcgctctgaagtcttttaacctcataaaaatcataggaaggctcgagagcctctgccgcctgtttgccgtcggccgtggccgcctgctttttcagcagcgtcagcaccttctcaaaatcaagagtatgtatatgtcgttttgtaagctcttccacggcttttctccttatgatgtgatggtttcgtaaaaatcaagtgtattaaagcttctttcaaggcgaagccttacatattcccccgttatttttgacagctctcccagcttttcctcggggagcgaaaagaaaaatgcttttttcatgccgttgtcggaaataagccgcaaagccgaaagaatgtccctgcaaagcgcctttccgccctttttgtgctcggcacaaaataccgtgccctcatgcatatcgaaaaacagattttcctctcttccgcaaattccgcagcccgaaaggtccggacggtagcccgaaagccgcatcatctgcatctcgaaaatcgcctttatctgattttcgggcagcctttcctcctcgagaaatttgaggcagttgagcataagcctgagaaaatcctcggccggctcgtcgcttggacaaagcacccccgcaagctcgcaaaaatattgggcgagagacagcttttcaagactgtcgcgaagtccgaaaaagacctctttgggcgacgcctcgctcacccgaaaggaatcccttgaaggggaaaaaacaaaatcggaaaaacagagcagtcccgtggaggacgccgattttccgattatttttcttgctccggtggcaaaggcccgtataagacccgcctctctcgtaagcacggtgattatgcggtcgctctcacccgtgtggcgctcccttataaccagtccgtcggtgcgaattttttccttcactgtttttctccgcaaaaaagttgtttttaacattacagagggcgagataatcgctcaccctgccggtggaataaaatctgttccacgccttttgcaaatcgttttcggacattttcatccctccgaaaatattttttgcaaaagacgattttatatttgaggtaatttaatccaagccgaaattgtgaatggcggcccgctgatttctccagccctctctcaccttgacccaacagttaaggttgaccttacagccgaagaaattttccatatcccgccgcgcaagggttccgacccgcttgagggtttcgccgcccttgccgattataatgcccttgtgtgtctttttttcgcaaaaaatcgtggcgtcgatgtcgagaattccgtcatcccgatccttgaaccgttctataaccacggccgttccgtggggaatttccttgtcgagggttcggagcagcttttcccttataaactcggccgcaagcaccctttcgggctggtcggtgagggtgtcctcatcgaacatatgtatgccgtcctcggcaaacttgtcgatttcctccataagaccgtcaaagccgtcgccgtttttggccgacacgggcacaacggcggcaaaatcgtaaagcttgttatattcgagaatgaccgacagaagatcggttttctcctttatcaggtcgattttgtttatgacgagaatggcgggctgttttccctttttgagctttttgcaaagctctttttcgatttcggacggcttcttttcggcgtcgacaatgagcagacaaagctccacatcgctcatgccgtctcccaccgccttgaccatgttttctcccagcacggttctcggcttgtgaaatccgggcgtgtccacaaaaacatattgattgtccccgacggtcaacacgcccatgacccttgttctggttgtctggggcttgtccgaaactatgaccaccttctgcccgagcagtcggttcattatggacgacttacccgcgttggggcgcccgattatggcaacaaatgccgatttttgttttcccaaaatatcttctccgtttagttaagggtatagtttgacgatctcggaagacccagctgttccatgacggtttcttccttttctctcattctgacagcctcgatgccgccggcctcgtgatcgtatccgagcagatgaagcattgaatgagcggtgagataggccatttctctgcggaaggaatggccgtattcctccgcctgagcataggccttcggaatggaaatgactatgtcgcccagcattttcgctcccgtttcgggatccacgtcgtattccccgttttctccgagggggaaggacagcacgtcggtggtgcggtcgacgtttctgtgcttaagatttatctcgtgcatctgcacgtcgtccacaaaggagatgtcaacctctgcgcttccttcaaagccctccataatgagcacggcattgcagcagcggcgaagcagcattcttattcccgtgggaatttttctttccttctgtttgtcactgaaaactaccttggctttttccatttttcttctcccttcgtttatcttgattttctgctttgattatatcggtcataagccttgattatcgactgcacaagcttatgccgaacaacgtccttttcgttaagtgtgataaccgccacgtcgtcgatatttttaagcacctttgtggcctctacgagtcccgacctgtgactgtcggcaaggtcgatttggggaatgtcgc

SEQ ID NO: 4627 - DNA, 9784 bp, Unknown
  16S sequences of unknown bacteria
taaattttccggtcagaatgcgtttttgaaaggaaaatgggatgagttttgtgttatagtactcctcggagtataagatcggcgtagaggattgggtgtagaacagggagcggagcgtgacaagggggaaatcctccgggacatccatgctctgggccagataccctgtgggcaggcaggcgtcaagatggactgtcgcggtctgcagcagctcgtcacacatgctttggaggaaaaaatagatgttggtatccatcagcgccaggtcacagttggactggtcgtagagcggcgcggggatatagtcctccacgacgatgacaggccgctcgtcggcgtagacgaccttttcgaagagatagaccccgtctgctgggtcaatccgcagcttttctgcgaggattggcgaggcgggggagagcagcttcagcttgcgcagcgtcgcccgaggcgtatagccgcagctggcgacgatatcgacatacgtggagtcaatatccagccgggcggcctccgccagaacatagcggttgatcagcgtcccgacgccacgcttccgggtgacgtatccggcggcctccagctgggagagaacatcccggatcttgacccggctgacgcccagctgcccggcaatgttctcctccgaaggaagccggtctgacgtgttcgtttcagcaaaggcgcggatccatttcagaagccggacgcatgttgccgggtatctctcatatggttgtgctctcatgcgtactttcccccctatcctagctttattatgctgcaaaaaaacgaaaatgtccagatgatttgcggcgaaattgtgaaaattgggaaaaatttttcaaatttttcccggggagatcagtcttactgatcgttgcggaggatttcctgcgtcggcggcgcagctttacccgggcggcgtgctgacaggcgagcgggttgtttcgtgggaaaacaaaccgcagatttcgcggtttgggtggctacgacggggatttttcccggcgaggggatggaacgtatcggaggacggcacagtggctacatcggcggtgcagcggctgagatatgggcacagcaggatgagtcttactgataaatctgaaaataattttaaatttatgaaatttaacgataaaaccggcatattgcacataaaaaagttgaaatattctatttgacattcccaaaataccgtgctatcttcaaaataggaaccggcgctgccacggcggcgtttcgcaagggaaacgaaacgacacagggaggttcgcacatgcaacagttttatgatcaattgctggaatatgtcctcgacggagaggaagacgaggcggtcgagcttacgcgggctcaaatcgaggcggggacttcaccgctggagatcgtgcagaaatgcctggtgccgatcctggatgatatcggggaccggtttgcgcggctggagctgttcctgccggatctggtgatgtcggcggacgtggccaaggcggttaaggatgagatccgggcccatttgctgggtgctgcgtcgggcgcacagagcgccgggaaggtcgtcatcgggaccgtccagggcgacgtgcatgacattggtaaaaacatcgttgctaccctgctggaggtcaatggctacgaggtcattgacctgggcaacgatgtgcagccctattcgtttatcgagacggcacgtcgggagaaggtcgatattattgccctgtcctcactgctgacgacgtccatgccctatatggcggatctgatcaagatgctccagggcctaggcgtgcgggatgaattcaaggtcattgtcggcggtgggccggtgtcccaggtttgggccgagtccatcggcgcagatggctacagtgacgacgccaatgcggcggtggagctgtgcagaacgatgatggaatccagaaaggcagggtgagggcatgaagtcacatacgagattattgaccgtcctggaccggatggacaacggcccagtgatggatgaaaaggattttgataagctaatcgcgaaaacagtccggaagctcatcaaaaaatatgacctgcagtacgatcgcgacgacgcgatcctgaccagcgacgagatggcagaccgcttctttgccgccggcctggagctggcctgcacggcgggcgtctactgtacggatacccatgtgcagatgctcttcacggaagaggagatccgccaggcgttgcggtgggcgccggatcaggtgaccatcggctctggactggaccagtgcaccatcgtctcccggcggccggaggacccggtcgtgcccaagattgtcggcggtggctttggcgcgccgatcccggaggaatggttctcggctgttatggagagctacgccaaggagccggtgatcgactccatcgtcggctgcaatttctatacagcccacggccgcacgccgaagacccgcagtccctgggaggtcctgcttgcctggcgggaggtcgagctcatcaaatccgctgcccagcgggcgggccgccccggtatcggcatcggcgtcgtggaaaacgccgtttcggagatcggcgagctctctgcttcgtcctatggcggcttcccgcaggaggattggcatcacacctgcttcgtcagcgagctgaagacgaattacgggctgctcatcaaagtagcgcacctggtcaagaccggctgcgtgatccactcgttctataactccattctcggcgggtacgccgggagcgcagagggcgtggccatctgttctgtggcggggatcttgctggaatgcgtcgtcaatatggcgacgaccttctccatttgcccgacgcaccccttctacaactgcgataccgcgccggagttaatctgggcggccagtgcggcgcagcaggcggtcaaccgcaacacgcatcttctgacggcggtcatgacctcaccggtctccggccccatgacggagagtctgctctacgaatgcgcgacaatggcgacggcggcgacggtctccgggacggcccggatcgacggggttcgctcggcagtcggtgtcgagatcctgcatgtgaccggtctggaggcgcggttcaacggcgaggtcgcccatgcagcggcgggcttgtcgcgaaaagacgccaatgagatgatccgccagttccagaagcactatgtgccagtcctggacaaaaagccaatcggtaagagcttcctggaggcgtatgacccgatcaaggtcgagccgacgccccagtggctggaaatctatcagaaagtcaaagaggacgtggccaagatcggcttgaagctgcaatactaaggctgcggcttgcaaggaggtacccatgcatcggctgctcattcgaaatatcaaaaccctggtttcttgtgacgcggaggaccgggtgtacgaaaacgtcaatctctactgtgaggacgggctcatccgctccatcgggccggaggctccggcggcggacgaggtgctggacgcgtcccacatgctctgctatccggggcttgtgaacacgcaccatcatctctaccaggtcttctcccgcaatctgccccaggtacagaatatggagctgtttgactggctcacgacactctatgagatctggaagggcctacgggaggagacggtccggctgtcctctctgactgggatgggcgagctgctgaaaaacggctgcaccagcgtgtttgaccaccactacgtcttcccggcggacgccggggacctgctgggggcgcaggcgcaggctgcggagcagctgggggtaaggatgcatttttcccggggcagcatggatctttcgaagaaggacggcggcctgccgccggattccgtcgtgcaggatgtcgatgagatcatgcgccagagcgtgaccgccatcgagacgtatcacgacccgtcgttccagtccatgcgccgggtggccctggcgccgtgctcgccgttctctgtctcggcggagctgctgcggcaaagcgcgatcctggcgcggcaatacggcgtgcggctgcacacgcatctgtgcgagacgaaggatgaggagcgctatacgttggagcgggtcgggatgcggcccttggcgtatatgcagagcctgggctgggtcggtccggatgtctggtatgcccacggcatccatttcaatgacgaggagctgcgcctgctggccgagacagggacgggcgtgtgccattgccccatctctaatatgaagctctcatcgggcatcgcccgcattccggagatgctgcggatggggattccggtgggcctgggcgtggacggctctgcctccaacgacggctcaaacctcttggaggagctgcgggtgagctatctgctgcaccggctgcaatccagcgacaaggccccctcgggctatgaccttttgaaggtcgcgaccatgggcggcgcgcggctgctgggtcgggagcgggagatcggctccctggaaccgggcaaatgcgcggacctatttttggtggacgcccggcggctggagctcgtgggcgcctgctatgaccccaaggcgatgctctgcaccgtcggcttgaagcagccagtggactatacgattgcaaacggaaaaatctgcgttgcacgcggccgcctgaccggcgtggacgaagagaagcttgcccagtcggcggagcgggaggtgaggcggtatctggcatagtgccggagcgatacagaaaacggaacacacgaaaagcaaaaagaaaaccaaaaaggcgcacttcggtgcgcggaacgcaacgcgaccttgcggcggaacgccgcgatcatcggattggatgtatgtgaaaatagggggggacaaaccatgaagaaaatcgttgcattgtttcttgtgattggaatgctgctgtgcctgtttgcaggctgccgcggcgagaaagatcccggcagcagctcgacaccgccaaacgcaggcacccagacagatggtgaagacgataccgtggattacagcaaaatgaaggtcggcctgctgctgaccaacgttgtggtcgacggcggctggtgtcaagcgcaggcggaggggctgaaaagagctgccgcagacttgggcatgacggacgatcagattgtcatgatcgagtcgctgtctgaggggggctcggaggcggactctaccattgtgcagctcatcgacgacggctgcaatctgattattggcggttcgtccggctttgtgaccaatattaacggtttatgtgcccagtatccggatgtctattttgcccagtttgagggcgacaccagcgagaactgctgcggctacagttgccgggatattgaagcaatcttcatgtgcggctacgccgcagcgctgatgagcgatgtcgaccagttgggctatgttgcgccgaacccgcagacctccgttgtccgcggcatcaatgcctttgctgctggcgcaaaggcggcgcgcccgaatgcgactgtccaagtcgcttgggtcaacagctggtatgatccggctattgaaaaggaatgtgccaattctctgctgcagagcggcattaagtgtttgggctacaacggctccagcactgcagtttgtcaggcggcccaggaggctggcggctattgcaccggctataacatcgatatgcacgattacgcgccggaggctgtgctgacgtccttctgctggaactgggcgcctcagtttaaagagattatcacccagattgccagcgacaaatgggataattctccgaaatatgccggtatcgaagagggcgcggcggccctcagcgactggaacgctgagatcatgcccgctgacgtgattgaaaagtgcaatgccatgtatgaagatattctgaatggcaaatatgttgttatgggcggtccgctttccgaccgcgacggcaacgagctgctggccgacggcgagaccttcaccacggaggagctcatcgactgctactggctgctggataatgtcatcggcacactgccgtgattatcgtgattataatgagaatttaatacgttccttctgagaaaagcgcgggggctggggtgtgtgccagcccccgccagtcatttgcaaagggacaaagtgattgacaaaacgtgtcccattctgtatgatagagataccaattttatacaagccatgagtgctccggcccctgccggagagaatagggaaccaggtgagaggcctggacggtaccgccgctgtatgcgtggatgctgcttgcaccaaatgagtcactgggagaccgggaaggctgtgcaggcgggaggagaagcgtgagtcagaagacctgctcgtgggaaaccgtatatttgggtttgttatgcaggaagacggctgttataacgcgcgacgtgttatgacacccgtcttttatactatagcgatagaaggaaatagcgccggggatcgcccggcagagcatgtttaggtgggatcgcatgaagcaaagaaagaaaccgatccagcgctgggtggggctggcgctggctgttgtgctattggcgggcttgacccttagcctggtgggcgccgggcgggctgcgccggaaaatcctctccaggcgcagaagaccgagccgctggagcaggagaccctggctggaacggtcggggggctgaccagtgcggagcaggcggaattagagctggagcgggaagagcaggagcagcctcagcagcaggaggacccgcagccggaggagcagccggagacggtcatccagcagccgactccctccgataatagcaagccccagcccggcggaaatacaacgcctggcaacggagaaggtgagaatccggatccggatccgtcgccggttcccggtgagccggatattgtgacgaacttggcaaacgggacggtctatgaaagtgatctgacggacgatatcctgccgttttacgcccgggcgatcaatgccgggagcaaggcgtacgtccaggtgaagctgaaaaataaggacacgaacaaccgcttccggaccctggatagcgaccgaaaaggaaatttcgaggcaacgctctccttcggcagcaacgaatttcgaatgtacctgatgaagaacggcaaaagcctgttggagcggacggtgacggttacctacgaggtgcagcacgccgggccggataatcccaacatgggcgacgcaccgaagatcgtcaccaatctggacgatgccatcaccagccagggcggctgccatgatgaaaagaacaatgcctttgagtttaaagttacagtcactgcggcggacgggcattatatccagaacaacttcatcaccgtccagctcaccgataccgaaacgggcacgacgacggaaattcgggagtataccggtaaagatacatataactacgccctttcctttaccccaccgaacattggggatgaaaagctctattatgtgacggttcttgcagtggacgaccaaaacggcaaaaacagcgcttggcagcgctactccatccgctatctgtccacggcccagggggatgtcaccggtcaggcgacggtcatcctggacgcgacgaccgtcggcctggatgtgatggacaccatcaccgtggatgtcaaggccggtgatacagcggcggacgtcgtcgaggcggcgctggattcctacggctacagtgtggaagccagccgcggcggcagctactatctgagccgcatctaccgctccggctcgtttgacgggagcattcctgataccctggcgcaaattcttgagacggatggcttcgtcatccagccgacgtataacagcgatagcctcggcgaccgggattatacctccggttctggctggctgtgctatatgaatggtgtgagcatcacccagtctatgggcgcggaggtcgtctctgcgggcagcacgatccagatgcgttttaccctggcctatggcaaggatgtcggcagctccagccggcagggcggacaatttgaccactactgctacagctgggtcggcggctacgtatcagagcgagatcacctgaagcagacggagacccgcgtcgagccgacggagacggcggacggctgggtcggctactactgcgcccgctgcggcaagcagatcgtggagcaggtgcttccggccaccgggccagtcaacccggacccgtccccgacaccggacccggatccggaacccaatccgccggaaaatccggacccggcccccgagacagaatcggagagcgggctgaccggtctgttgcgcgcggcgctgacgcggcagacagacctgaacctacaaaaagaaatgaggttgcagcttcttgaaaaaactgagaattttggccagcgtattggcggctgtcctttgcctttcctgcgtgccgctgcgcgcctgggccgcctctgattccctgcagacggcgctggacgcggcggggcaggcggaacgcctgctcggcggcggcacggccgacggccttttgaacgaccagaacgcctgcccggcaggctccaacttctgcgattgggccgcctttgccatggccatcaccggtcagcaggaggattatgacacctacctgacggcgctggagcattatgtcacgcagatgtatatggatgcggatgcgctgacggagatcaacggccgccaccgcatcgcgctggctgtccttgcaatgggcggcgacccgacggccttcggcacggcggcagacggcagtaagatcaatctggtcgccgattccacctacgcctatcccggcgacctggaggaggatacgacaaaccggatgatgtatgccctggtcctgctggacgccaaggggtatcctgtcccggatgacgcaaagtacacccgggagggccttttgcagatgatgcttgaccggcagaaccccgaatccggcggcttcggcctgacggcaggcggcgaggatctggatatcacgtcgatgacgctgcaggccctggcgccttaccgcgacgacgaaaaggtgcagaaggctattgacgcggggctggactttattcagaaacagatggatgaaaacggctattatgtcgccttcgggacggattcctctgagagcctctccatggtgattctggcgctgtgcgcgctggggatcgacccggataccgatgagcgcttctgcgcgggcgatatcacgccgacccaggcgctgctgagctatcagctggacgacggcggcttccgccatgtcgcttccgataccgaggggaatttcatcgcgacacagcaggcgatgatggccctggagggggtgcggcggctgcgggccggtgagccgggcatttacgacttcaccgcggcgggcagcgccggggtcccggtctatgtctatatcgcgggcggcgccgtgctggtgctggccctggtaatcgtattggcatacgtgaaaaagagaggaaagaaagatgtttgaaatcactcaagagattcagaagcagatccgccgggtcgtgatcggcaaggatgaggttgtccgcaaggtcctgatggcgatcctctcccgcgggcatgtcctgctggaggacgtcccgggcgtcggcaagacgacaatggcgctggcctttgccaaggtgctggggctggacacaaagcgtgtgcagttcacatcggatacactgccttcggatatcatcggcttctccgtctacgatcgcgagacggtgagcctgcagtataaagccggcgcagttatgacgaatctgctgctggcagatgagatcaaccggacttcccccaagacacagtcagcgcttctg

SEQ ID NO: 4628 - DNA, 20869 bp, Unknown
  16S sequences of unknown bacteria
tcgcagggcggtcttcatctttgtaaaactcccgtttactgcggccaaatattttgtttctgatttccaatctctttttatctctttaactcatgattttttacataatattgtggaaatatacacaatattatcacagagactttgtccatataattttagacaaagaacaggcggaaaggcggtgaagcacattatcgactatagccctctgtggaaaaccatgagtgaaaagagtgtctcgcaatatcacctgctgaaatcaggtatcgacaacaaaacactcgattcactgaagaaaaataagaatatcactctgctcacagtggagaagatctgcagaattttagactgcactccaaacgatatcgtagaattcaaagaatagactgttcattgttttaatgaaatcgcagtctatttttgattttaagacaattttcattctgaaacggctttttctgccgatcatcctgtccgcaaatattgcccgatcaaaaatacgtctctttcctgcggatcattccttcgtaatattcttatatttattttacgagaagtatttgaatctgtcattggacttgtagtcgaaaattttatatccccgctcatattcccatatcaccagtctctcaactacgcgccatatccgtatgacagatcccgctccttaaaacgataaacagatcggaaaacacataaaaatacgaggacatcgctgccctcgtattttcaagcaattaagtttaggagagttatgaaaaagatttaaagatttgttatttgcccttccgcacttatatagtagtcgaattctgtgtgtttttcctatcggttttctgccgtttctgtaacgttttcgtgttgttttgatgaagatacttctgaaagaaaagcctctattccctcatacaccggcgctgccggcggatttctgctcactcgattatcattgccaatatcatcgacgaatcctcgctccttcgattatcctgtcgaagtctccctcacccggctatggcatccaccgcagccgcgaaactcacctgctcctctgagttcgaaggatttcctgttccgtaaaatacgtataccggatacagcagaaaacccgcttcttcaggattcgaatcggaataatacaccagagaaacctctgaaatttccaccccatacagcggttccccgatatccgcaaaatactgtccctgcgtcaacagcttttccgccgccgcttcctcttttaaaggaacggatttatactctttcgaatgattgaagtaagaactgatttctgcgatttcgccccgggaatcaaaggaaaaaatcagacgatagacgccccatacctcgcatccgtcgatcaatagaaagaatcttgctgatttatccatatagccatcatccatttttcattaaaattaatttttatttcatcatttttcagcgctatcgccataagcattgtaattgccgccaaagaaaaaacatccgcgcctctaagcgcggatgtctctgcatttagattttcaatttttctgattatccttattttaccactactctgtggaactttttcttgccttttttgatcagaagggcgtcgtcttcaaacatatccagcgtgatctgctgcttcttatctgtgatcttttcgttattcactaaaagaccgccctgctcgatagtccggaacccttcgctgttgctcggaaccagacccagctccttgatgagagacacgagccctacgccgtctccctcaaatctggacttttccatctctgtcgtaggcacgttttccatgccgcccgcgccggaaaacagagctttcgatgcttccttcgccttctccgcttcttcttcgccgtgaaccagggtcgtcagctccatcgcgagaatttctttagcatcgttcagtttgcttccctcccagttttccatctcagcgatctgttccagcggaaggaaagtcagaagcttcatacattttatgacgtctgcgtcatctacatttctccagtactgatagaattcgtacggagaggtcttttccgggtcaagccatacggctcccttaccggtctttcccatctttttgccttcggaattcagcaggagcgtgatcgtcatcgcgtgagcgtctacgcctaacttccggcggatcaattccgtaccgcccagcatattgctccactgatcattgccgccgaactgcatattgcagccgtatctctgatagagttcatagaaatcataactctgcatgagcatgtaattgaattccaggaaactgagacccttctccattctctgcttatagcattccgccctcagcatgttatttacagagaaatgaggtcccacctcccggagaaattccacataattgagatccatcagccagtccgcattattgaccatcagagccttatcatcggagaaatcgataaaacggctcatctggaccttaaagcaatcgcagttgtgctgaatggtctccggcgtcatcatctgacgcatatccgtgcggccggaaggatctccgatcataccggtgccgccgccgatgagagcgatcggcttattgcccgcctgctgaagccttttcatcagacagagcgccataaaatgacctacgtgaaggctgtctgccgtcgggtcaaaaccgatataaaatacggccttgccgttgtctaccatttctctgatttgttcttcatttgtgacctgtgcgatcagtccgcgggccactaactcgtcatatagtttcataatccctccaacagtacgcttacgcctcgatcatatcgatccttcttctgtgtctgccttcttcacattctgtgttgagccatatttccaccattttgagcgccttggcctcttccacaactctcgcgcccatggccagcatattggcatcgttgtgtttcctggacatttccgctgtaaattcatctgtacagagtgcgcagcgaatacctttcaccttatttgccacgatagatataccgataccggttccgcagcagacgattcccttatcacactcgccggaggccaccgcttccgcggccatgcgcccaaacgtcggataatcgacggatgcaggagaattcgttccaaaatccatgatatcgtaattattgtctaccagatactttttaatcgcctctttcagttcaaaacccgcatggtcgcttgccaatgcaatcattttccatcctccgttctctcatactctgacgattttaccgtcagcggcattccgcatcctgttcatgacagcgacaccggcgccttcttctctgatgcccgctgcgaaaatcatatcgacacgttcggtgtcgaatttccgcagttccttaaaaaacagacgcgcggctgtttccacatcgccctcaaaatcgataaccccggccgttttcccctccgcctgagcgttttttacagccgcctctatagcggaacggacagcctgaggatcgccgacaaaaagtgtcagaggcgctgccggcacataatgccggtatttcagccccggagacaccgttttaccctcactgcagtcagatgacgctacagtgagctgtccgaggggacctcgtaaattctcctcggaatcacctcctgaagctgatcctttgtgatcgttcccggacggacgatgataggaaaatctcccgacagatctataatcgtggattcgatacccgtcttacaatccgggcctacgagaatcatatctacttttccgtttaaatcatcgatgacatgctgacctgtcgtaggactcggatggccggagatgttggcgctcggcgccgctacaggcgctcctacctcgtcgatcagtgcgcgggcgataggatcatccggctgacgaacacccacgctgagctttccgcctgtgacattactcggtacacgtccctgaattctcggcattacgatagtaagcgggcccggccagaattcctctacgaatttcgacatgaactgattattcggagctgtgatatcgatgacgagatgaacgtccagatccctcgcaaccagtacggagatcggattatcttttggacgctgtttgacttcaaacagcctgtccaccgcctcctcgcaattgatcgatgcgcctaccgcatagacagtgtcggtggggaatgccactatccctccatttttcataacttcggccgcttccacgatcttatcacgatccttttctggatctgtaatcgtataaatctttgtttccataaaaaattacctccgagtaaaccatccttatattagaaatttttcattttttccgcctgatcggatgtgataagagcatcgatgacatcatccagatcaccgtccaggaaatagtccagcttataaagagtcagaccgatacggtgatcggaaatacgcccctgagggaaattgtaagtccggattctctcgctcctgtctccgcttcccacctgactttttctctcttcggccatttcgctgtgctgctggctgagcatcatatcgtaaagtttcgccttcagtaccttaaatgccttctctttatttttcagctgagatttttcgtcctgacatgtaactacgagaccggtcggctcatgagtcagacgcactgcggaatccgtcgtattgacgcactggcctccgtttccggacgcgcggtagacatcgacgcggacatcgttcggattgagatccacctctacgtcgtccgcctctggaagaacagctacagtggccgccgacgtgtgaattcttccgctggattccgtttccggcactctctgcactctgtgcaccccgctctcatacttgagacgggaatatgcgcccttacctttgatgagaatgaccgcttctttgattccgcccatgccggtgtcattgatatccatcatctctgttttccatccgcggcgctctgcatatctcgtatacatgcgcaggagatccgccccgaagagcgccgcctcttcgccgccggttcccgccctgatttcgagaataacgtttttctgatcattgggatctttcggaagcaaaaggattttcaactcctcgctgatcttctcatcctccccttccagatccgaaagctccatcttcgccagctctctcatatcgttgtcagcagaattatcagacaggatttctttggcttccctgataccttccactacttttttatattccgcgtatttctggacgataggctccatctcgccgatctctttcgcgtacctctgccagaccgcctgatctgcgataatcgccggatcagacaccttgaggctcagctcctcatacttactctgtataaaatcgagtttatcatacataaaattcactcctgaaaaaatacctgaaaacgcccgtaaaaaacgcttccagccgctgtacatgacaagaaacagaatcccccgccaccgctctgtatctattgtatacataaacggtccgtgaaattctgccgctttcagatatcgaaagtcctgaaattaatttttccagccgcaccatttttcaaccctgtttacggaatcgtataccttgacgccgccgatcatgatgcaactgtatatttccattattctaatgtctttccgcgcgtttttcaattcctttttcactgtaatttatctacagccgcaaaccgaacagacaaatccggcgataagacaggaacgtatcgcttctttcggctttcgggccgccggtgcagcacagatatgccaaaaggtttcttccccgcgacgggcgccgcaaagggaagggttgaagctattataccacaaaccttttcctattgtctaaaaaaccggcggctctatgctgtgttttatcagcagttcgatttttcgatcatatacgtcggaaaaatcgggaaattcacctatcagtctgaaataacattcaaaatcatccagccgaacagaggtgctgagacatttttcaaaaagggcctgtgtcatatgctccggatgactcatcgcatcccgctcttcttcgctgtaatcctcggtctctttgaaatcttcttctgaaaatacagaatctacgctccaatcatatatgcccatcacattcccacccaaacgtcctttccgcatcagccgcaaatattgtgattatatacacaatattatatcagacaatttgttagtagaattattcaaaaatacagaaagatggtgataagtatcatcgactactctcccctgtgggaaacaatgaaagaaaagagtgtctcacagtaccgtctgctgaactccggcatcgacaacaaaacactcgattcactgaagaaaaacaagaatatcacactgctcacactggaaaaactgtgcgatatactgagctgtactcccaacgatatcgtacaattcaggaaaacagactgacggattttcgaaagattttgctgttcgcaaatgcagcggagagatccggcggtctgtttttgtatttaacgtttctttcatacacatccgcctgaggccttgctgtatatgagatctaactatttgaattttaccccgaaataaaaattctgtcattggattcaaagtccaaattttgcaaaaaaacagaccgaccgaaaaatatattttccgatccgcctgatacgcagaaaaaaagccggaatcgaaattccggcttgtcgttcttattccatattgaactttttcttgaatttttctacacggccgccgcggttgatgaacttctgctgacctgtgaagaaagggtggcatgcggagcatacgtctaatctcatctcttctttggcagacttggtttcaaaagtgttgccgcatgcgcaagttaccttgcagaccttgtaatctggatggattccttctctcatctttttcacctcttttcgcgtggagtatatatggacttcacgtttttctctattttatgttttgacatgcgacgctgcaaaatcacaacgatagctttaacagcataccacactgaaaatcaaagagcaagtacttttctcccggattttagaattttccgatgaaatgcaaaaaaacaaatccgcatcaccttttacaatccattttcaccggaaaggcgatctttccgccgggcatgtcaccgctgcctcctgcagctgattacgcgatccagtcccgtcagatctttgtgaacttcgatctcactatagtatccggcgcccctgagaagagaggtcaccgcttccgcctgatcgcagccaatctccagaaacatcagcccatccttcttcagactcccgaaagcgtcctctgcgattctccggtagaaatcgagtccatcacttccgccgtcaagagcctttatcggttcgtgatcccggacttccgtctgcagcgtatcgatatcctgcgtaggtatatacggcggattcgagagaatcatatcgaaagaatcttttatacgaactgttttttttctttttgtcatgaagaaaagatcggattcacgaaattcgatcctgccgttcagaccgtttcttgccgcatttccgcgggcgacttccagcgcttccgggctgatgtcacaggctgtgattttcgcttttggcagaaaatgcgccatcgaaacagcgatcgcaccgctcccgcagcacatatccagaatcgataaagacctttttttctctcccgcccgcttcagagctaattccaccagagtctccgtatcctggcggggaatcagaaccgagggattgaccgcaaaattcagccccataaattcctgacttcccagaatatactgcaacggttcccctgcagctctccgatcgatcaggctaaaatatgcgtcagcccgatattcgtcggtagcgtcatttctgtgaacatagagaaatgttctgtccgctttctccaagtacagcagaagtgtctccgcgtcccttttggcatcggcgatctttgcctcttccagccgatgaatccccacttccagcatatgtccgaatgtaatgtacatttttcgtaactctcccaacttccgtccttcgtgcgttttttatgaataacccgccggctattttttatccagttcttccagcatcgaaaaatcattgacagccaagtcgccctctctgacagccggatgttccaggtcctttaaaagctctttaaaaattactgtctcctgcgccgtctcagacgattccgtatcgttccgtctgtcctcccgctcattctcctccgctgttccagcggatcgcttctcatccttctctccgacagctgattgtctgccttccgggctgatatctccttccgcgatttcccgagacgctttccactgttcccggtcgatgagattgcccttactgtccgtatcgaaaatacgggactgcggaggttcctcgctgaggcatacatttaccgcgacgatcgctacttccagcatgctctcgtcaggaactttcgtcgtcagacgctgcatcagcagaccgggaacgctcagaaccttaaccacagccgaatcacttcgtcctgcccagcggagaagctcataagacaggcccgccaccaccggaatcagaagaattctcgacagaagtcttacggcgatgtttggccaccccaggaaagaaaacagcagcagactgatgagaaatacaaacataataaagctcgtgccgcatctcggatgaagcgtttcaaaccgagcgcagttttcaggcgtcagttccagaccgttctcataacagtgaatcgtctgatgttccgccccgtgatactgaaagactcttcgaatatcctgcatcttagaaatcagcaccacatagacgataaacatagcgattcgaagcacaccctcgatgagattcagcaaaatcgaactgtcggtaaacgatctgcacagacccactacccaggtaggcagaagaacaaagatcccgaccgacacggccagggctacgatgaccgatccatagaggagaaaattaaacagcgctttttcaccgaatttttcaccgaaccatctttcgaacctgcccggctccgattcactgtcctcttcctcgatatcctcttccaccaccccggcggagtacatgagagtctttgtccctgtcaccagagaatccacaaacgccaaaacgcctctgagaaccggccatttcatccacgcttttttcggcggaagcggttcttccttcacattaatcgaaccgtctgcccttctgactgcgatagcggaacgatccgctcccttcatcataataccttccatgacagcctgcccgcccattttggtgggattggcgtcttttataaatatcttgctgaaatccattgcttttaccccttaaccaaatacctttgtcctgttcactatatttatgaaatccgcattgcttttcgtatgagccagattgtcgataatagattcggtaacgtcctgaactccctgattcgacatggcccggcgcactttccagatcgcttccagttcttctccggacagaagaaggtcttccctccgggttcccgacttattgagattgatcgctggaaaaattcgcttttccgatagttttctatcgagatggagctccatattgccggtgcctttgaattcctcgaaaatcacatcgtccattctgcttccggtctctataagagccgtagccagaatggtaatgcttccgccttcctccagctttctcgccgctccgaaaaatttcttcggtttgtgaagagccccgggatcgataccgccggaaagtgtcttccccgaagacgggactaccatattataagctctggcgagacgcgtgatactgtccagcagaatcactacatctttgcgatgctcaaccatgcgctgagcgtgagccagcaccatttccgccaccctgacatgatgttccggctgctcgtcaaaagtggaatagatgacgtcgcccttgatggagcgctgcatatcagtcacttcttccggacgctcatcgatgagcagcacgatcacatgcatctccggatgtttttcctcgatagttgccgcgatatttttcagcagaaccgtctttcccgctttcggaggcgcgacgatcaaaccgcgctgacctttcccgatcggagccaccagatcgataagacgcatcgagagatccgcctttccgttttccagactgatccgctcatacggaaaaatcggagtcaagtcctcaaagttcggacggcgcatagaaactcccggttcgtcgtcatttaccgtattgacatacagcaatgcgccaaaccgttcgccttcattcggtcttcttgaaattcccttgattttatcgcctgttttcagattaaaacgccggatctgcgttggagatacatagatgtctttatcgcttgtaagaaaattatgaaatcttaaaaaaccgaacccgccctccgcgatatcgaggatgccgtctactggcggccgctcttccgcggtatactgacgtttctcgctcttttccgttttttcgcgcagttcgtttctgtaatttttctcccggtgcggactcgcagatacggaatctgtctcccgggcgctgtctaactgacctgcggaatcctggcctgcgctgctgaagttcccgctgtttcccatcgcgttttcaccgctgccggttctgtcttcgctgtcaggattctccccgctgcttccttccggacaatgggacggatagggagagtgttcctgataacgcggacgattctgccggaaatcagaaaaatccttgcgcttctgagatcctctgtgcccctgttcttccatttttcccctgtcttctgcagacgcatccgccggttctgaggtattctgcatccgactggactgattcccctctgaccccgattttacagctggtatctccgatggctccgtatcactgtcgttttccatttttgcagagctcttttccaccgctgaagcggaaacgccttcttcaatctccggagattgtcctgctcctgccttttttccagcgtctccggtttccatctctttctttttctcaaatgccgtattttctgtgcggaatgtcccctgctctcgtttcgttccatcaatcagcaggttcgctttcagccgggcaatcagcgcctctttcagctccggttttctcatttgtcccggattttcaataccgaattgccgcgcaagttcacgcaattgatctactttcatagatttcacgtcatttgcgtctacgtttgtcatattaaataagtcccccattgcaaaacatgcggatccgtaccgaaaaatcaggtcagatccgcaccttttgagtcattttactattttaccttcgcataagtcggtttttggttcatatcgtgaaccgcttcgataaagcgcacggttcccgtcgcgcttctcatcaccaccgtatgcgttttcaccttattattcggaaggaatcttacgcctcgcagcatatccccgtcgctgactccggtggcgataaacagaacatcgttaccggctgccaggtcgtcagtggtcattaccttatagtaggacggatctgtctgcgctcttttgatttcctccgacgtatgagccaccagtcttccctggatttcacccccgagacacttgagcgcggaagctgccagtactccctccggacatcctccgatgccggcgagcacatctacaccgctgtcctcaaagcaggtagcgatcgccgctcccacgtccccgtcagtaaaaagcttgatccggcagcccaactggcggcactgcgccatgatatccttgtgccggtctctctcgagaatcgtaacggtaagatcctcgatattcttgtcaagagccttcgcaatattgagcagattttccttcagcggcttttccaaatcgatagcgccttttgccttcggccctactgccaatttttccatatagaaattcttcgtattatacagacatcctctcggagcgatggagatcaccgcgatagcgttagaaagtccctttgcggtggaagtcgtaccatccagcgggtctaccgcgatatcaacctttgtcgcatcggtaccgccgataccgatctcttcaccgatatacagcatcggcgcttcatccttttcgccttcgccgatgacgactacaccgtcgatatttaccgtatcgaacatatttctcatacctgtaaccgccgcctgatccgcggcattcttatccccgcggcccatccacttggccgacgcgatggctgccgtttcggttacacgcgccagttccagtcccaggtctctgtccattaccttcgtcgattcatttcctgtagtcatcttaaaatatctccttcaaagtcacatcggtttccagattccggctgccgtcaactcccgtcgtaaaacaaagttgactcgacacagcctcgtttcgattatttctgctgtttctaaagattcagattattcatttgtactgtcggatccggtactatcgccggttgctacctgataaatttccagcaacatttcctccgtcttggcttcgtcctggatataataggacgtcgcgccgatatactggccctcgcccggcagtgtgtatgtggtgatcgcattgctctcgagccccatggctttcagggcgtatttggacgccgctcccagcgtcacgtcagatttgacatttgacgtgatcagttttgcggaatccacgataccgtgttcgacacactgtttaaaaagagacttcataaatacctgctgtgcttccacacggccgatatccccgttgctgtaaccctttcggaatctgagatactgcaccgcatgctctccgtccagcgtctgctgacctgccggaatacgtatgtgaagcggtggatcgtcatacggatcgtcatatttcatcgcttttggcacatcgatcggtactcctccgacaccgtctacaatcgattctaccgcatcgtaatctatgatcgcgtaataattgatcggaatacccatcagaacgtcgctgaccgcattcgcagtagcgataactcctttatcgctggcatacgcagcatttatttttttctgagaaggagacgtatagccgtctctttcataataagtatcacgcggtatcgaaatcagatctactttattggaatccatatcccagctgaccagcatcaatacatcagaaagaccgtcgtttacacccaccgccagcagattaacccgcttcgcgtctgcaaatgcctcaaaaaacggactgttcggatctaccaaaacatcgatttcatcttcgatgcccccgctgacgccgtcggagttatcaaagatttgaatatttgatacgagcttgaccaccggtatgagaatcagcgtaaacagaaccaaacaaattagaaatacttttacaaaacttttagccatctcaatttcctgtcgttttcccttctaacttttcctattgctatgaatattctttcccttctatctcgatacttaatcatatacttatttttctgacagcgcaacaaaaaaaacggccgaacgagtcggccgttatgattctttagaatttatttatatttatagaatccttctccggttttctgtcccagttttccggctctgaccatttttctgagaagagtgcaggctctgtatttcggctctctgaactcttcatataatacgtccatgatcgaaaggcagatatccagacccaccagatccgccaaagcgagaggtcccatcggatgattcgctcccagtttcatcgcctggtcgatatcttccgctttcgccagcccttccgctaatacggataccgcctcgttgatcataggaaccagcattcggtttaccacaaaaccaggggcttccgtcacgagaatcggtgtcttctgcagtttctttgccatgtcaacggcgaagtcaatcgtctcctgagatgtgttgtatcccggaatcatttccactaatttcatgaccggcgccgggttaaagaaatgcataccgatgactttgtcatccctctttgtcacagaggcgatttctgtcacggaaagagacgatgtattcgtcgcaaggattacttccggtctgcacatttcatctaattgacggaacaattctttcttcgttcccatattttccgaagccgcctcgatgacgaaatccgcatccttcagaagttcgatgtctgtagaccctgtaattctggccatactcgcatcgcgctcttccggcgtaagccagccgttggagatcataaactcataatttcccaacactttatcctttgccgcatttaccgactcctgtcttctcgcacgataaacgacctcaaaaccgtgctgtgcacatatctgaatcaggccgattcccattgtcgatgcacccaaaataccgattttcataaaataacctccttacgactatctgcctttaaactccggctttctatgctccaggaaagctttcattccttccttctgatcctgcgtggcaaagcacataccgaacagatccgcctcgatggagatacccgtgtcgatgtctgtctccagccctctcttgatagccgaattcgcccatttcactgcaagcggtgcattggaagcgatcttcactgccagagcctccgcttcctccatcaatttgtccgcgggaaccatacggttgaccagccccagtttttccgccgtcacggcatcgatatttgctgcggacagaattatttccgcagcctttgcctttccgacgatagcggtcagacgctgcgtccccgaaaatcccggtgtaatgcccagtcccacttccggctgaccgaatacggcatattcggaagcgattctcatatcgcaggccatcgccagctcgcagccccctccgagagcaaatccgttgacggctgcaatcgtcggcttctccgcccgctcgatcctacgaaaaaggatctggcctcttctgccaaaggctctgccctcctccatgccgagatctgccatttctccgatgtccgctccggctacaaaggctcgccccgccccggtaaagataatcacccggatggattcatcactgagaacagcgtccaccgctctctccagagcctccagaacctctgaattcagagcattaagagcttccgggcggtcgatcgtaacaacagcgacagcattctttttctcgactgaaacgtaaggcataacctcttctcctttccctgacaccggcataatacaaaactctgtccgcagataatcgcccctcattatttcacggcgcctggtgcagacaaaattatgcttatatatattatatctacaacaattatcattttcaagaaaatcggtcatgtataaagtatgtaagatgattctgtacaaatgcacaaagaacctgtgctctcaactcctcaatgttacgccgaatacagatcggctacatcgcatttgatcatttcggccacacgacatgccgcagctcgatctctcggcaggcagtcgccgtcttcccatgctctcagcgtatccagcggaacaaatgttttattggcgatatccttcagtgtgataccatatcttcttctgttttctctcatcttcaaattcatatcgatcactcctcttcatctgtgcggttcaggcggcgccaaccactgcgccgcctcaaatcccgcgattaccaacattttgctttcctctctatcttaaagcctgtccatacgtccggacaacgaaattcctccggcaatatctgctgagcttttacaagtttcgacaaaataaccacaatatattgataatttgataaattttgcttcttattttttcatatatctatttattatccaaaaaactccatttcaaagccggttttctttttaaatctcctccaaagtatgaaatacaaatgtctttaaacaaatttttacattttttccatttaataaataaaaaaacacgctggtatcctccgtgaatcattcacgtaggataccagcgtgtgtcacaataaaccgctggaatattttttattttttcagaatcgccggatgcatccctgcggtacacagaagaatgcatccgaaattatcgggacggaagttcactccgtcagccgatctgccccggtccgctgacagtgtcggcccgcccggcagcccgatatgctccggatagatattcacttctgctcttttctttgacttagttcgatgtacctccccatgtcgccggactatttccttcaacattcagaagatcctccgcatcgctttcgtcgataacgatcagcacattagcggcgccttccgtctcatcgtcaatagtgtaagcgatgacatagcagccctcgtagacatcgctgagagttcccgtctcgtaaacgagttcatttccgtcaggagagcaggtatatacaatacactgatcttccgcggcgaggaagtgcttcgtttcagaatcggttcccgtgtaatagcggaccaggctgtccgatctgcgctccacttttgagaaaagaggcgaagaatcgtctgaaacagcggtgagaatgcactgtacaccgtcagaggtttctactctttcatccaccggaacgatctttttcaccacaccgttggacatctgcagatagacgagggcgttatcgccgctatactgattcaccaaattcttcagtccggtgtttgtcagcacttcgtggacgccgtctcccatcagaaaagtaatgctgccgacgatttcatctttcttattcagggtcgatcccgtttccaggataatgccgaacgcccggccgctgaaatcgtccaatctgtccgccggcttctgatcgtctccgtcgtctttgccggaatccggatcctcagaatcctgcgcagtcatacagttataagtcatgaccgcggtgtttcctcgcgtcagggatttctgcgcatccgctgccggatcacaatcgaccagattttctaaaaatcccttatctttcgcgctttccatataattatccggccacgcgccgcctaaagaactgtcgctgtcaccgtcggctctgcacagaagcgcaacgtactctgcgagggtgatctgcttagatcccttaaaggactgatccggataaccggcggcaatccccttttctacacagtaaccgatataaggtgcggcccagtcggacgcctctatatcgctgaaagatttcgctgcggactccgcggccgctttcagttcatcttccgcagctcccagcatctgcacgatcatcttgcacgcctgcgcacgggtcacaatcccctgcgggcggaacgtgccgtcttcaaatccgtcgatcacgcctttttccgtcagatatacgaccgctttttcatacggtgtgccggcgacgtcggaaaactgcgccgctgcaggcccatcctgtttttccgccgcaaaagaagcggcagctcccatcgtcatgacaaggacacatgaaacgatagctgaaataattttcttcattgtctaatcccctttcgatcctgtttctcactgataaaaactgttgccatgcagaagaaggcggatccccgccttttctgtttttattgtaccatacaggcgccggcagaacaatgcggaggaaattacgagatgtttacaaaaaaatgcatattgacattcctcgcctttcgtgtagaattctaatgtaagaaaccttatcaagagcggctgagggaacaggccctgtgaagcccggcaaccatcgcatccttaagcgtagatgcgcgaaggtgctaattcctgcagattttttctggaagatgaggtgcacgcttgaaggatgacacacctcttcgcagcgaagaggtttttttatatcccgaaagcatcagaagaccatttcccggaaattttcctgaaacatatttcacgataaagcaggatgtacaaaatgcttccagatattttgaaacatccgcgtgcggcgccgccgcgaaacagaaaaggagcatcagatgagaaaattatttacctcagaatcggtgaccgaaggacatcccgacaaaatctgtgatcagatttccgacgcgatcctcgacgccattctcgaaaaagatcccaacggccgtgttgccgcggagaccactgtaactacgggcatggcactcgtcatcggagagatcactaccaattgttatgtggatattccgaaaaccgtgagaaacgtcataaatgacatcggttacacaaaaggtgaatacggctttgacggaaatacctgcaatgtcctgactgccatcgacgaacagtcctcggacatcgcgcagggggttgacgaagcgctggaatacaagacaggcgagctggcgcagacagaagaagatatcatcgaagccactggcgccggtgaccagggactggttttcggctatgcctgcaacgaaacggatgaactgatgccggcgccgattatcttcgctcacaagctggcgaagaggctgactgacgtgagaaaagacggtacgctgccttacctcagacccgacggcaagacacaggtgaccgtagaatacgacgaagagggcagaattatcagaatcgacacggttctcatctccacgcagcacgatccggcagctacactggaacagatcagagcagatcttctcaaacacgtgatcactccggtactgcctgcagatcttttagacgacaaaaccaagtatttcgtcaatccgacgggcagattcgtcatcggcggccctcatggcgatgccggtctgacgggaagaaaaatcatcgtcgacacctacggcggttatgcgcgtcacggcggaggcgcattttccggcaaagatcctacaaaggttgaccgttctgccgcttatgcagcgagatacgtggcgaaaaatatcgtcgcggcaggtctcgcggataaatgcgaaatccagatcgcatatgcgataggcgtagcgaaaccggtatccgttttagtagacactttcggtacagcaaagattccggaagccgaaatcgaagaaagggtgagcaataatttcgatcttcgccctgctgcgatcatccgcgatctggatctgagaagaccgatctaccgccaggtagccgcttacggtcatttcggccgcacggatatcgatgtcccttgggagagaacagacaaagcggaattgctgaaataatcaaaaaaacgcgcaacagagtgtcccatatgtgcataagaaaaatgcgctcttacgccggtgcaggaccgcgtaaaaagtaaaatgctgcataacacagcgatcagacgatacaaaacggaagggagaaccggagtcatttttatgaccccggttctcccttccgttttgtatgaaatctgcttccgccgcagaaaaactcacaggcaaaagcgatctgcgaaaacactttcgctcagttcatcttattttttatactctcatagagcagtctttccagatgagttctgtcaaactgataactctttcggcagaactgacaagtcagttctgcactgccatcttcctcgataatatcgcggatctctctgcttcccagactgagtaccacctgctccaggcgttctacagagcagtcgcactgccatccgatgtccagcagatccataggggatacctcgaattcctccggaagtccgctgaaagcttcgccgatcagttccttcatcagtgtcccgaccgatttcgcaccggcattttccatgacctgagataccagttccgtgatcttaggcatcttcggaagccagttttccaaggcctgaaccgcctcttcgccggcatcaggcagcatctgaataatcagtcctccggcggcttctacagcgccgtcttcactgagttttacgcccagagataccgatgtctgctgctgctcagagataaaaaagtaagccgtcatatcgtcagcgatctcaccggaaaccagatcgattctccccacataaggttctttcatgcccgtatcgcggatgcatgttatcgtaccgatgccgagagctccgcctacgtccggactcccatcacttcggacgggaagatccacgttcgggttgacgatataacccttcaccgcgccatcggaagaggcggtgcagagcacctgctgtgccggtccgtcgcctttaaactgtagagtgactttaaatcccggttctctgagcatgagacccatcagacccgtaccggtcagcgctctgcccagcagatgtgtcgccagcggcgaagtctcgtgaatgagacgggcatcttcggccatctttgtcgtaatcgccatatatacgcggaaagatccgcttttgtccattcctgtaattgctttatttattttcataaatgtaaaccgatctgctgttgtgttgataaaagactattcttcgatgcatgtagcgaaatatgcctcaatctcatcccagtccgtcagacgagtctctgcagtacacatcggctttaccagtttctcaaattcaccggtgggattcagccattcttttggaacgtccagtttataaaactgaaaccctctttcaaaaccgtatttcagcccttcgagcttaatcgtgccgttgccttccgcatcgatcgggtttactgtatataaatcagtattcgcatatctgctggtctttacacctaactttctcatccgtattccttctcctttacttataaactatttctgttctgacgacagtttcttataccatatccttcgatattcgcgccgtcggcgaatgtcggatacagagcaatgattccttctttgcggcatcgccgcaaagccgatgattgggatcattataccataaatttccctcgcaggagaatctttaaacgcaga
